United States Patent Application Publication US 2014/0038845 A1 - sequence listing, part 2

SEQ ID NO: 4697 - DNA, 1413 bp, Zea mays
  misc_feature (590)..(593): n is a, c, g, or t
  misc_feature (617)..(618): n is a, c, g, or t
  misc_feature (658)..(658): n is a, c, g, or t
  misc_feature (668)..(668): n is a, c, g, or t
  misc_feature (670)..(670): n is a, c, g, or t
  misc_feature (714)..(714): n is a, c, g, or t
  misc_feature (716)..(716): n is a, c, g, or t
  misc_feature (728)..(731): n is a, c, g, or t
  misc_feature (734)..(734): n is a, c, g, or t
  misc_feature (737)..(738): n is a, c, g, or t
  misc_feature (740)..(740): n is a, c, g, or t
  misc_feature (742)..(746): n is a, c, g, or t
  misc_feature (748)..(750): n is a, c, g, or t
  misc_feature (757)..(767): n is a, c, g, or t
  misc_feature (773)..(780): n is a, c, g, or t
  misc_feature (788)..(788): n is a, c, g, or t
  misc_feature (790)..(801): n is a, c, g, or t
  misc_feature (806)..(816): n is a, c, g, or t
  misc_feature (820)..(820): n is a, c, g, or t
  misc_feature (826)..(831): n is a, c, g, or t
  misc_feature (835)..(837): n is a, c, g, or t
  misc_feature (839)..(839): n is a, c, g, or t
  misc_feature (843)..(850): n is a, c, g, or t
  misc_feature (852)..(853): n is a, c, g, or t
  misc_feature (856)..(858): n is a, c, g, or t
  misc_feature (864)..(883): n is a, c, g, or t
  misc_feature (891)..(892): n is a, c, g, or t
  misc_feature (897)..(900): n is a, c, g, or t
  misc_feature (907)..(907): n is a, c, g, or t
  misc_feature (910)..(911): n is a, c, g, or t
  misc_feature (920)..(926): n is a, c, g, or t
  misc_feature (928)..(948): n is a, c, g, or t
  misc_feature (957)..(967): n is a, c, g, or t
  misc_feature (974)..(976): n is a, c, g, or t
  misc_feature (978)..(989): n is a, c, g, or t
  misc_feature (993)..(996): n is a, c, g, or t
  misc_feature (998)..(1004): n is a, c, g, or t
  misc_feature (1007)..(1013): n is a, c, g, or t
  misc_feature (1016)..(1019): n is a, c, g, or t
  misc_feature (1021)..(1021): n is a, c, g, or t
  misc_feature (1023)..(1038): n is a, c, g, or t
  misc_feature (1040)..(1052): n is a, c, g, or t
  misc_feature (1055)..(1058): n is a, c, g, or t
  misc_feature (1061)..(1070): n is a, c, g, or t
  misc_feature (1072)..(1074): n is a, c, g, or t
  misc_feature (1077)..(1078): n is a, c, g, or t
  misc_feature (1088)..(1098): n is a, c, g, or t
  misc_feature (1100)..(1101): n is a, c, g, or t
  misc_feature (1108)..(1124): n is a, c, g, or t
  misc_feature (1130)..(1130): n is a, c, g, or t
  misc_feature (1132)..(1135): n is a, c, g, or t
  misc_feature (1142)..(1168): n is a, c, g, or t
  misc_feature (1170)..(1170): n is a, c, g, or t
  misc_feature (1173)..(1176): n is a, c, g, or t
  misc_feature (1180)..(1183): n is a, c, g, or t
  misc_feature (1185)..(1185): n is a, c, g, or t
  misc_feature (1187)..(1187): n is a, c, g, or t
  misc_feature (1189)..(1194): n is a, c, g, or t
  misc_feature (1196)..(1201): n is a, c, g, or t
  misc_feature (1203)..(1210): n is a, c, g, or t
  misc_feature (1212)..(1227): n is a, c, g, or t
  misc_feature (1232)..(1234): n is a, c, g, or t
  misc_feature (1239)..(1246): n is a, c, g, or t
  misc_feature (1253)..(1254): n is a, c, g, or t
  misc_feature (1257)..(1257): n is a, c, g, or t
  misc_feature (1259)..(1285): n is a, c, g, or t
  misc_feature (1288)..(1296): n is a, c, g, or t
  misc_feature (1298)..(1300): n is a, c, g, or t
  misc_feature (1302)..(1302): n is a, c, g, or t
  misc_feature (1304)..(1309): n is a, c, g, or t
  misc_feature (1316)..(1316): n is a, c, g, or t
  misc_feature (1318)..(1318): n is a, c, g, or t
  misc_feature (1326)..(1332): n is a, c, g, or t
  misc_feature (1335)..(1336): n is a, c, g, or t
  misc_feature (1338)..(1342): n is a, c, g, or t
  misc_feature (1347)..(1347): n is a, c, g, or t
  misc_feature (1351)..(1356): n is a, c, g, or t
  misc_feature (1364)..(1366): n is a, c, g, or t
  misc_feature (1371)..(1381): n is a, c, g, or t
  misc_feature (1384)..(1409): n is a, c, g, or t
ttacgatgccacaggctgcaaggccggcgatgactccaccgccatcactgccgacgagcgaggcgaacgcgaagagggcgatcttgccgtaggtcggggcaaggttcaggttggtgaggcccattccgtaggagttgcagaacgcaaccacgggagcgaagaagtagcacaggaggacaaggtaccacttgagctggggaaatatggcgggcacactggcggtggatattgctgccaggacaatgtaaccagaagcagcaaaccaaggagatatactatctttgaggaatatctctgtttgtagtttctcatctgctagttgttcacaactcccgtcatctgcagatgagatgacgaaacatgcattggacaaatactatgggcatgtcagcttttcgtaagacggcatattagatgagctatatattgtgcaactaatgttcgcaactcacaagccacaaaattaatctcaaagcatgtggccaacgcattgcactacaactaagaagtaacatgtttaccttccatagcttgaacaggcagctcacgttgtttcgattgcatgctgcataatcaaaaagctctggaannnnaacgtgttacttcttagttgtagnncaatgcgttggccacatgctgtgaaattaattgtggcttntgagttgcgnanattagttgcacaatatatagctcatctaatatgccgtcttacgnanagctgacatgcnnnnatnatnntncnnnnntnnntttctcnnnnnnnnnnncatatnnnnnnnngtggggancnnnnnnnnnnnnaaaannnnnnnnnnnaagnatttcnnnnnncatnnnantttnnnnnnnntnngcnnntttcgnnnnnnnnnnnnnnnnnnnnaaatcccnncccgnnnngcccccnctnntttcccccnnnnnnncnnnnnnnnnnnnnnnnnnnnnccggtcttnnnnnnnnnnnttttttnnntnnnnnnnnnnnntggnnnngnnnnnnntgnnnnnnntcnnnnanannnnnnnnnnnnnnnngnnnnnnnnnnnnnacnnnnccnnnnnnnnnnannncannccccttctcnnnnnnnnnnntnnccatctnnnnnnnnnnnnnnnnncaattngnnnnggggggnnnnnnnnnnnnnnnnnnnnnnnnnnntnttnnnntttnnnncncntnnnnnntnnnnnntnnnnnnnntnnnnnnnnnnnnnnnnaaaannnaaaannnnnnnnaaaactnntcntnnnnnnnnnnnnnnnnnnnnnnnnnnnatnnnnnnnnntnnncncnnnnnnccctttncnttctcccnnnnnnnccnntnnnnntgtantccnnnnnntttttccnnntctcnnnnnnnnnnnacnnnnnnnnnnnnnnnnnnnnnnnnnntttt

SEQ ID NO: 4698 - DNA, 364 bp, Zea mays
gctcgagcggcacgagaggctcagccagtgggcgatgtacatggacgcgtcagggttccgccgcgtcccgctcagcttccgcgccattagggagagtgagctcaagctcgcgagcttcgggatgagtgcatgccgctaccaggtggaaagcgacggccttctgctggggtggggctccacgcgtctctactctgtatcggcgtggaggccaaacaagtctgggatcagagagtgtacgtttaggagttgatatgatctggcgctgtatctgagttacttaattcataacacgcatcagttttaaattgctatctggaaagaatcaggttgttgttgcccttcctatctgagaggtttctcagag

SEQ ID NO: 4699 - DNA, 638 bp, Zea mays
tacctcttcggtacacaggccacactgccatgccatcccttcccttcccagctgtgctcgatggagcattatattccaattaatgacgtaatgtaatgtacgcgtacgtacgtggccgttggttttgcttttgcagcagctgatgagaagcgtgcatcgctagactgggaggcaaggtaccgcatcctctacgggacagcgcggggcctgctgtacctccacgaggactcgcaggtcaggatcgtgcaccgcgacctcaaggccagcaacatcctgctcgacgccgacatgagccccaagatctccgacttcgggctggcgaggctcttcagcgccgacaacaccaccaccgtcacgagccaagttgtcggaacgctgtaagcgagcctgttaatgtaattaagctgtgttgccgagcagctccgctccgcgacctgatgaagaagacgcgcctgtttttttttcatgcctgcttggcagaggatacatggcgccggagtacgcggttctggggcacctgtcggtgaagcttgacgtttacagcttcggagtcctgatcctggaggtcgtaactggacggaggaacaccgacatgttcgagtcggcagccggagagtccatcatcctgctgagctaca

SEQ ID NO: 4700 - DNA, 880 bp, Zea mays
  misc_feature (53)..(58): n is a, c, g, or t
  misc_feature (810)..(813): n is a, c, g, or t
  misc_feature (816)..(817): n is a, c, g, or t
ggcgtgctaggtgggagggcggggcggaggagctggaggttcctggtagcggnnnnnnccggccatggagaagaggaagcggaccctggagctgcgggatcggctggaccggacgctggcgatgcccgacctcgcggaggaggcctcgctcagggcgctggtgaagaagcagatcctggcgtcgtccctgcccggctccgatcaaggtgcttgcttgctctctttacttcctctgctcagctcgcgtggttcatctatttcttggactgagtatgagcatattaatggcactgatgattgtaccgtttcttcttttcaatgatccgtttgagcctttatggtctgattagagaaggtaggggcgctagtgctacctgaaggccttgattgtggtagcgtatttgctggcctacatgtaaaaatggttgtctgctcagtgtttcttgactagtgcttttgcgtgtcctctttcaggtgacatcgatctcattgctgaaacgcgggcaaaagaagtctctgagtttcttgaaatgctagatacttcgagggacggacgatcttccaaggtccatgggctgccacagaaggagtggaaggtatgcatcaaactgaatttgttagctcattcatagtgacatcagctcgctgaaataattattctttttttagtttgtgatgctatcaccattttccagaatgcaacatttcacttgtgtttgtgatttctatatattattagattatatggtgcttcaaagttctctaacctgttcatgtccagtttttgggatcgattagtttctcttttannnnaanngttagtgcttatgaatggctgcagtgatccttagctacttttcgtggcagggaagcaagatca

SEQ ID NO: 4701 - DNA, 1378 bp, Zea mays
  misc_feature (568)..(576): n is a, c, g, or t
  misc_feature (578)..(578): n is a, c, g, or t
  misc_feature (580)..(584): n is a, c, g, or t
  misc_feature (586)..(586): n is a, c, g, or t
  misc_feature (591)..(596): n is a, c, g, or t
  misc_feature (598)..(617): n is a, c, g, or t
  misc_feature (620)..(634): n is a, c, g, or t
  misc_feature (636)..(636): n is a, c, g, or t
  misc_feature (647)..(655): n is a, c, g, or t
  misc_feature (659)..(673): n is a, c, g, or t
  misc_feature (676)..(677): n is a, c, g, or t
  misc_feature (679)..(679): n is a, c, g, or t
  misc_feature (681)..(686): n is a, c, g, or t
  misc_feature (692)..(693): n is a, c, g, or t
  misc_feature (695)..(729): n is a, c, g, or t
  misc_feature (731)..(736): n is a, c, g, or t
  misc_feature (739)..(745): n is a, c, g, or t
  misc_feature (749)..(750): n is a, c, g, or t
  misc_feature (752)..(758): n is a, c, g, or t
  misc_feature (762)..(765): n is a, c, g, or t
  misc_feature (768)..(772): n is a, c, g, or t
  misc_feature (779)..(783): n is a, c, g, or t
  misc_feature (786)..(792): n is a, c, g, or t
  misc_feature (794)..(795): n is a, c, g, or t
  misc_feature (799)..(804): n is a, c, g, or t
  misc_feature (809)..(809): n is a, c, g, or t
  misc_feature (816)..(828): n is a, c, g, or t
  misc_feature (830)..(833): n is a, c, g, or t
  misc_feature (835)..(841): n is a, c, g, or t
  misc_feature (843)..(861): n is a, c, g, or t
  misc_feature (863)..(871): n is a, c, g, or t
  misc_feature (874)..(881): n is a, c, g, or t
  misc_feature (883)..(885): n is a, c, g, or t
  misc_feature (888)..(893): n is a, c, g, or t
  misc_feature (896)..(896): n is a, c, g, or t
  misc_feature (898)..(899): n is a, c, g, or t
  misc_feature (904)..(916): n is a, c, g, or t
  misc_feature (918)..(925): n is a, c, g, or t
  misc_feature (932)..(937): n is a, c, g, or t
  misc_feature (940)..(950): n is a, c, g, or t
  misc_feature (952)..(954): n is a, c, g, or t
  misc_feature (964)..(970): n is a, c, g, or t
  misc_feature (976)..(976): n is a, c, g, or t
  misc_feature (978)..(986): n is a, c, g, or t
  misc_feature (989)..(994): n is a, c, g, or t
  misc_feature (1001)..(1001): n is a, c, g, or t
  misc_feature (1004)..(1006): n is a, c, g, or t
  misc_feature (1008)..(1010): n is a, c, g, or t
  misc_feature (1012)..(1016): n is a, c, g, or t
  misc_feature (1018)..(1030): n is a, c, g, or t
  misc_feature (1035)..(1042): n is a, c, g, or t
  misc_feature (1050)..(1055): n is a, c, g, or t
  misc_feature (1057)..(1057): n is a, c, g, or t
  misc_feature (1061)..(1064): n is a, c, g, or t
  misc_feature (1066)..(1070): n is a, c, g, or t
  misc_feature (1074)..(1078): n is a, c, g, or t
  misc_feature (1080)..(1085): n is a, c, g, or t
  misc_feature (1087)..(1089): n is a, c, g, or t
  misc_feature (1092)..(1109): n is a, c, g, or t
  misc_feature (1111)..(1127): n is a, c, g, or t
  misc_feature (1131)..(1134): n is a, c, g, or t
  misc_feature (1136)..(1141): n is a, c, g, or t
  misc_feature (1143)..(1143): n is a, c, g, or t
  misc_feature (1145)..(1153): n is a, c, g, or t
  misc_feature (1156)..(1158): n is a, c, g, or t
  misc_feature (1162)..(1167): n is a, c, g, or t
  misc_feature (1170)..(1170): n is a, c, g, or t
  misc_feature (1174)..(1178): n is a, c, g, or t
  misc_feature (1183)..(1185): n is a, c, g, or t
  misc_feature (1189)..(1194): n is a, c, g, or t
  misc_feature (1199)..(1204): n is a, c, g, or t
  misc_feature (1207)..(1211): n is a, c, g, or t
  misc_feature (1213)..(1216): n is a, c, g, or t
  misc_feature (1220)..(1227): n is a, c, g, or t
  misc_feature (1229)..(1237): n is a, c, g, or t
  misc_feature (1242)..(1268): n is a, c, g, or t
  misc_feature (1270)..(1298): n is a, c, g, or t
  misc_feature (1300)..(1302): n is a, c, g, or t
  misc_feature (1305)..(1322): n is a, c, g, or t
  misc_feature (1330)..(1331): n is a, c, g, or t
  misc_feature (1334)..(1343): n is a, c, g, or t
  misc_feature (1345)..(1345): n is a, c, g, or t
  misc_feature (1347)..(1350): n is a, c, g, or t
  misc_feature (1352)..(1352): n is a, c, g, or t
  misc_feature (1354)..(1356): n is a, c, g, or t
  misc_feature (1362)..(1367): n is a, c, g, or t
  misc_feature (1370)..(1375): n is a, c, g, or t
cggggagcttcatcggcagcatcgacgagaccgctgaggtgcttcagttctgcgtcgacaaggggctcacctcccagatcgaggtggtcaagatggggtacgtgaacgaggcgctggagcggctggagcgcaacgacgtccgctaccgcttcgtcgtcgacgtcgccggtagcaacgtcgaggcggaggcggcggcggcggatgcggccagcaactgatggcaccgcgtcgtcgagtcgaaccacgtctgtgcgccgcgtgcaacgttcgttcgggtcgagtctgcgtgcaacgttctgcttcctttactagttgttgtctttccgccttcttgccgttctgttctgggctttgagatgagacgatggatggtcagtttaaactatgggcatgacagcttttcgtaagacggcatattagatgagctatatattgtgcaactaatgttcgcaactcacaagccacaattaatctcaaagcatgtggccaacgcattgcactacaactaagaagtaacatgtttaccttccatagcttgaacaggcagctcacgttgtttcgattgctnnnnnnnnnanannnnncncaccnnnnnntnnnnnnnnnnnnnnnnnnnnctnnnnnnnnnnnnnnncncaccaattaannnnnnnnncctnnnnnnnnnnnnnnntannantnnnnnntcactnncnnnnnnnnnnnnnnnnnnnnnnnnnnnnnnnnnnnannnnnnacnnnnnnnaacnnannnnnnncaannnnaannnnnccagcannnnntannnnnnncnnctcnnnnnntctcnactcccnnnnnnnnnnnnncnnnngnnnnnnntnnnnnnnnnnnnnnnnnnnannnnnnnnncannnnnnnncnnngcnnnnnnctngnnccaannnnnnnnnnnnntnnnnnnnnacccacnnnnnntcnnnnnnnnnnncnnncatctcttcnnnnnnnatacancnnnnnnnnnacnnnnnncccttcnacnnntnnngnnnnncnnnnnnnnnnnnnctccnnnnnnnntccccctnnnnnncntttnnnnannnnncaannnnnannnnnnannncannnnnnnnnnnnnnnnnnannnnnnnnnnnnnnnnngtcnnnncnnnnnncntnnnnnnnnntcnnnttcnnnnnnctncccnnnnncctcnnntctnnnnnnctcannnnnntcnnnnnannnnctcnnnnnnnncnnnnnnnnntcccnnnnnnnnnnnnnnnnnnnnnnnnnnncnnnnnnnnnnnnnnnnnnnnnnnnnnnnncnnntannnnnnnnnnnnnnnnnngcaccacnnctnnnnnnnnnncntnnnncngnnncaacannnnnnccnnnnnnacc

SEQ ID NO: 4702 - DNA, 400 bp, Zea mays
gctggatttgaaccatgggatattacaatgtcagacctcttggctgggaagtcttctctcaaggagttccgtgggattgcgtttgttggtggtttcagttatgcagatgtgctggattcagcaaaaggttgggctgcatcaatcaggtttaacaaacccctcattcagcaatttcaggaattctaccataggccagacacgttcagccttggagtatgtaatggttgtcaacttatggctcttcttggctgggtgccaggatctgatgttggaggttctcttagtaaaggtggagatataacccagcccaggtttattcacaatgaatccggtcgtttcgagtgccggtttactagtgtgtccattggggtttctcctgctattatgttcaaagggatgg

SEQ ID NO: 4703 - DNA, 403 bp, Zea mays
tactcatctatatatttttacgatattctgaaaccttatcttgcttttcctagaaaaaaacttgttttttgggtcctaagaaaatcttctttggcccagtcaagtgttttccattgaccgtttccttctatatatattgcagagatccaaaagtttgtggaaatcaggaaagaaactgacgaagattccacagctcaccaaagtgaaatcgaatggagcagctcacctgtagaagaactaaatgagaagataaagatggtcgaattgaaactggaagaggccaccatgctcatcaatgagcgggattcagaaatacttgaactagatgcactcagccatgtacaaccacagaatacagtagcatgtaacaactatccgctgtccctacagtctgatagaagtt

SEQ ID NO: 4704 - DNA, 393 bp, Zea mays
tgggaggaaactagcgcagtacatatccaaagtctttttctttgttttttttctctcttttcccttttgtttgtgcgttctgggcaattcgcggttcgacgatcagttggttggcaatggttggttgatcgattggcgtcgttctccacatgtgcaggaccgagcttcttgatctggttcggaccgacgcctcgcctaacggtagcggagccggagctggtgcgcgagatcttcctcacgcgagcagaggcgttcgaccgctacgaggcgcatcccgtcgtgcgccagcttgagggcgacggcctcgtcagcctccacggagacaagtgggcgctccaccgccgcgtgctcaccgacgccttctacccggacaacctcaacgtaagacagagg

SEQ ID NO: 4705 - DNA, 375 bp, Zea mays
gggcgctctctgtgatttctgtggggagcagaggtctatggtttactgccgatcagatgcagcatccttgtgtttatcatgtgaccgtaatgtgcattcagctaatgctctttctcggcgtcatacaaggacacttttatgtgaccggtgtgcttcacagcctgctatggtccgctgtctagcagaaaatgcctcgctttgccaaaattgtgattggaatggccacattgcaggatcctcatctgccggacacaaaaggcagactataaattgctattcaggatgtccatcgtctgcagaactttctagaatatggtccttcgtttcagatattcctaatgtagcacctgagccaaactgtgagcaaggaataag

SEQ ID NO: 4706 - DNA, 1058 bp, Zea mays
tgagaggaggagttcgattttgaggaggatgagccaaagccaagagtgagacgattgctggatgaacaatttgatttggtgagcctacttaacctaatactccctttgtttctttttatataagtcatatttggattctgggatgtctttagaaacatactttgatcatcaattactcttacaacactacatcaattgcatcaaaattagttcctaaaaaatagatgtggaaagtggaatccaaacttgttgatataacttcaaatatactaagtgtgcatataatttgaataattattgatcaaacaatctacgaagtttgacatttggtcttttgtacattggaaaaaatggtaagtttacatgacaaagtcattatgttgagcttgtaacatgtctgttataaattggggaaaattgtttagaaggctcggtgatcatatgcacataatattaagtatttaagtaatacaattccttacgcaaaacaaaaatgaaagttcactttgattaatatgtaggaaacatatctgttgtgtcaactgtacttctgcctttatagctcgttggagaattagttttttctctatcaccggtagtatagaacctctggacaggaaaaacaaccaataattattagttaacatacacgatgtctcatcattcattagtgtttatgacatctatagttcattattactccattgctcaaagttttgagtagatgttgcaaatgctgtgctgaaaaatacttcttgcgaataaactttcagcttgctttggaggaatatggagacagtgatgatgatgacatgggtgttaaaggtggggaatatgaactgccaaatgaggctattgatgaactgaaattgttccaaaatcagaatgtatgtgttgatgaagaatatagaacaccagcagattttgttcgtcaaaaactggattcaagcatggctgatgaggtggatgaatctgctcttgtgataaaaaaatgtgctgaatatgctgaaatatatttaaatgaaactgcagaagaagaggtggttgtgctgttcgaa

SEQ ID NO: 4707 - DNA, 409 bp, Zea mays
gcttgtcgcgccaaagcaggaagaggaggtagcaccggtttccgctatggtatggacgaaacaagtatgggatgacagaacagcaattcctagggggagccaaatgaacagcaattcataagggctacagtgtttccaggtaggacatcttgtccacaagctgtacatgattgtggtttgtcattgactcttggatctggtgtacccgctgctggaattatactctcctatgcattttgtgaaagactgactggatgaagccttcttagtttatatactgtcatcatgtatccatatgtggcaggagttgggtccagatccagaaggcactgttgtgcccttttaacattgagtaaaagatgtatatacagtagaaacacagatcgggagtagcaatatcttagacgga

SEQ ID NO: 4708 - DNA, 439 bp, Zea mays
ttcatccgatactacctccctttcatgccaccgttacgctctagtgctgcgccgtcgtcttcgcctccgccgctgacgacaccactgacaccgtcgcaaacgccgccgccgccgccgccgctgccacaaaacccgcagctgcggtcggcgggcttcctttccccgagcggcgtcatgcacaacatgaccgacgaggaactgtactggcgagcgtccatggcgccgatggtccgccgcacgccggacagccgcgtgcccaaggtggctttcttgttcctggtcagggggaagctgccgctccggcctctgtgggagaagttcttcgcgggccacgaaggccggtactccatttacgtgcacgcccacccgtcctacaccggctcgccgccgacggactccccgttctacggccgctacatcccgagccagataacgaaat

SEQ ID NO: 4709 - DNA, 360 bp, Zea mays
agctgctaaacctggggatcgtggggctcatcacctgcgcctcttcgctcctcgccggcattatgatcgccgtcctcctgccgctctcggaggtcctcgccgtcatcttcctccacgagaagttcgacgggccgaagggcattgcgctcgtgctctctctttggggcttcgcctcctacctctatggtgagaaggcgcaaaagaagatggagactcagaagaacgagctgcaaatggtaaagaaaactgttgatctggagtcggctactctttgaggatctatgtatttcttcatttctgttttattgttgtgacagcatgtatccgcaattccgcatacgcagaggcatgcaagtatag

SEQ ID NO: 4710 - DNA, 423 bp, Zea mays
  misc_feature (7)..(8): n is a, c, g, or t
acaagcnnagttagcaactgggaatctgagataattaagtggttgaaaggcagagtgcaggtgctggccctctgtgaaagcacacgtgctgatgttctttccggaattgaaagtttcttaaaacccttgagccgtctccatgttttcttttgcttactaattatttgttaatatacactatactaaatgaaaatgtagctgcaagttaatgacaaattctgtggtgcatgaataatcttcaggtacttatcatatcttatgagactttccgcatgcattcttcatgcgcgcaccaagtgcgcgcagtgccataccgtggagcgaggtggcgcgcacaggcaggggcccaacctgcacggcctcttcggtcgtcagtcaggcaccaccctcggctaagcctactccacgaccaacaagaacatg

SEQ ID NO: 4711 - DNA, 599 bp, Zea mays
atggatggtcgttagtttcgagataaccttcccccagctgctggagatggcaagagacttgggtctcgacgtgccctgcgacgagccatccctgctagctatctatgcaaggagagacgcaaagctcgcaaggtatttggcgtgcagtgttattattaaattatacgtagattatccatatcttttatgagattgaattttgtgatgtgattgattctctttttttatattcccttgttttagaatccctaaagaattactgcacgcttcaccgacaactctgcttctgagcatagagggaatgccgggcttagactgggagagactactgaaactccagtgctccgatggttcgttcatgtcatcgcctgcacccacagcctacgctctcatgcagaccggcgacacgaaatgcctcgagttcctcgatggaatcgtcagcaagtttagcgggggaggtacataaactaaagggccccatgaatttctttcctaagtcacataggtttcaagaccgatcatatcttctattgccttccatgaatatgcagtgccctttacctaccctgtggatctgttcgagcacttatgggtagtga

SEQ ID NO: 4712 - DNA, 335 bp, Zea mays
cagaaacgcatggaagccaaggcggcgggtcccttcacctgcttctcctccagcttgttgggcccgaagatggcgaggcgctgctccgcctgctccgtggtgagaccctgcgggctgcatcggaggttctcgaacacctcctcgatcggtatgttctcctgcgcaggcgcaaaacagcaccgcagcaaagtggtgaagcaacagacaagaaccacccgagtttagtgttatcgggagacccgcgtaaaagaagatcaagaattggtgcgttgaagcggcggaaaaccacacgcacacaaaacaaaaggcagacatgacggtaaaaagaaagaaag

SEQ ID NO: 4713 - DNA, 421 bp, Zea mays
ctatcgttggatctaatattaaatagtatagtctgcttgtacgttagatcagacaagtgattgtacaaaattgagctccattttagaagataagctttggtgtctggtcctctttccttgaatccaaacccaagctcttggttaccttcggaaggagttggtgagctcgacggagctgaaggacccaaggttcttgtacggccccggcgagagcccatcatcagcggcaccaatctgccgcctcgcgtccacggcgctccgccgtctcctgtcccacaccctgtacgccccgaatgcagcagcagcgaccaccaccgcgacaccgacaacaaggagggccgccttgaccccgctcgcgcgcccaccgccgtgccctcgcgtcccttcctcctccaggctcctgatcttgaagtagcccata

SEQ ID NO: 4714 - DNA, 385 bp, Zea mays
aacacatccgcaaactcttccagaattcctgttagtgtctcatttccagccacatcttcctctcctttaacctcctccaacatcacaaacacccatacttcatctcccttcacccacttttctaactgcaaaacagacacctgttgcacctccctctttaggtctgcttccccttgaagtctaacctccaccccctgatcacaaaaggttagcaccttgttgatccagtcacaatgcattgggctatgttgtttcaaccagtcataccctaatatcacatcataagcctccaatgccaacaccctcatggcagttctataaacatgccccccagccttccacttcacctctctgacattttttcacacaccatgatctctccatt

SEQ ID NO: 4715 - DNA, 373 bp, Zea mays
ttccggcgagggaccccacggtgaccgtggagaaaccggccaccgcagcttcgctgcagctggtggtagcagcagcagcagcacctgaaccagcggtggctcagagcatgactacgggaacagaggccgagccgtccagctgcctggggtcttgccttcggcacatgttcagcccgccggcgcagggggaggactacaccatcctgcaggcgctggtgagcgtggacatgctggtgctgttcctggccaccatctgcggcgtgggcggtacgctgacggcgatcgataacatgggacagattgggcagtccctgggatacccggccaagagcatcaacacgttcgtctccctcatcagcatctggaactacaa

SEQ ID NO: 4716 - DNA, 501 bp, Zea mays
agatctgcagcagggacgagcagctagccatccatccatccacatgggccgttggttgaagccagatgtacgtatatacgcgtcgtcggccactcaaccatgcatcgttgtttcgttctcgatgtcgtcgctgcagagatccctgcagtgaaccggccgcgcgctcacgctcacgtctatttgtctttcattatgtgcgtcgtgcgtgcatgcaggtgtacccgctgatcgcggccatgtcgttcgtgacggggatgtgcgtgttccagctggcccggaacgtgctgatgaacccggacgtgcgggtgagcaagagcagccgccagagcgccgtgctggacaacgccgtcgagggccagcgctacagccagcacgccttccgccgcttcctcgccacgcagcgcccggaggtcttccccgccctcaacagcttcttctccgactccaataataataacacccccgccgacaagtgataaattcatctcatcgacggtatgg

SEQ ID NO: 4717 - DNA, 362 bp, Zea mays
tactgctttcggcgctggtacggttggattacaaccgtcgcagccgaatatgaacgcaagcctgatggccactccacctgcggtaccaccacctgtccaacccaatccgtggccctgggcgcagcaacaaacaggcatagtccaacccggtctccctgttccacctcagcagcagcagcagcaacaacaggctccccagaggcagcaacaacaacaggctccccagagcttccagacgctgatcgccgttggtggcagtaatggcaactctatgctcatacctaacgcaggcgcatcggttggtcccgccaccgtggcggcgaaggaaaccgcgcctccagagagcaagaaaggagagaaga

SEQ ID NO: 4718 - DNA, 404 bp, Zea mays
gggttcgaccccgggagcagaacgtggacctcaacatctccacagctcccgacgaggatgagccagggaaacccgctggcaccttgttccctggaggcaacatggtggccgtgccgtgcgccaactgtcacctcctagtcatgctctgcatgtcctccccatcctgcggtcctgccccaactgcaagttcgtgcagccgctgccaccttctgttgtgccgcctgcctatccgaggctcggtgccgccgtcaagccgctggagaccctcagccttctccattaggcgcatgcacgcgcgctccactggcagaagcttgtagaaaggaggaaaccatagttgagttgtgtgatgcatgggttagtattactattacctgggtaatggctgtatgaatgtgaacccc

SEQ ID NO: 4719 - DNA, 497 bp, Zea mays
  misc_feature (481)..(482): n is a, c, g, or t
  misc_feature (487)..(489): n is a, c, g, or t
tcctgtcaaatggagaggatgcgtcaactggccagcaagatgaaatggaactaaataaagctgaagttcaaattgatgatctgtcaaaagaagcaacaaaacctccttggaaagtaaccagagaacttaagccaccacttgtcttcttcggcgagacatcccgcccctcgtcgccctctcccagtcctcctccgcccgcaccaagctcaaaaccaaggtacacacaccaccaccaccaccacgtctcgcattattcccagcattcaacagaaatatccgatcaattcgcccgtctcagcttaactcgcaaactaatgcgcttccggttttttcccccgattgcgcaggcggagtcgctggtcgagatgctgcggcagccgcggagcccgagcctccgcgctcgaccagcggcggtggttgcggcggagtgacggcccccttcccaatcatccccccacttgtcttcttcggcgagacaagnnaatgnnnggtagggg

SEQ ID NO: 4720 - DNA, 444 bp, Zea mays
tagatgttgacggtgaggaacgagccggtccgctgcaggagctgcagcatgggcttcatcaccggctgcgcgatgtcgtcccggaacctggagccggacggcgggaacgaatccctgacggccgagaaggcgatcggcgtggacaccttgacggcgttggcgaggcccagatccgccagcgccttctgcacgttcttcatggcggggacgagggtcatcttgtccacgttcgggtcgtcgaacacctcgttcccgacggcgacggcgttgatctgcgtcctgggtaagtacttcttcacgttgtcctgcacccactgcgccgcgtacaccgggtccctggccgcgtgggccaggttctggttgggcatcatcaccatcgccttgatgcccgtgttggccagcgacgtcagcacggttgcgttggcgtcatatatcttcaccatg

SEQ ID NO: 4721 - DNA, 400 bp, Zea mays
gccatctaggcttatgaacaaagcctaatcattcaccgccgacgcctcgatgctgtggctgtttattctgaatttgtggaaatccttagaaggtgctaggagatagcaatttgttctcaccaagcttaggaacagtgtggccgcacggatgacgtatgacaagtgggtccgcaaatgctcggacaagctcttcgctgtgaaccttcataaagtcctcttcacctgcacacgtttatcccgtgtgtcagaaagagggcatgcttggaacacttggatacatgagaagtgatgaatcttgcattaaacggttcagacattgctgcagaaactggccaaaaagttcaggctggcgttcacagccagtttcggttttgactgaggtcttgttcggttaaaagtg

SEQ ID NO: 4722 - DNA, 412 bp, Zea mays
ggccgaactgctgccacggcgtgccgcggaactcgggttgatcctgtgctcgatcgcccataccacgaatccggtgaagcagaagaaggcgaggctggcgactggcgagccacaggctggtggtgagcggccgcaggaagatccacatgctcgtgctcgtttccgtgcgcaccgccaccaccatcgaccaccccgagtccgtgaacggcatgctgaagtccgcgctgcccatcctgctcgccgtgattgtcacgtcgccgacgacgatgtcggctatctgcagtcatcattggtggtcactggtcagcacacatacacaccctaccctacctacgtgctctctctgtctctcatgcttggtgtgtactgacctgtctcggcaccagcgacacgaggctgtcgtaggaactgg

SEQ ID NO: 4723 - DNA, 380 bp, Zea mays
cttttgcgacttagaaaaaaaatgatgcatcttaacctttgttcgctaactggcaacacaatcagttgtggtcgcaaataccaagtcaactgtttgttggattcttatcattgaagattgtttttttccttctgtttaatgccatttaacctcttctgaaaaatcttcaggtacctcctcttcagagagcacgacattttgggcacacttgtggactgattcagagcatcagcaagcctgtcactagtcgttggttctagacttctagtgtgagatgcgtagtatcagatcctgggatcaaaatccctgagaaagaactctgaactgtcgtgatgtcatagattttgtgatgaaacatcataattgcctgcttcttgttg

SEQ ID NO: 4724 - DNA, 621 bp, Zea mays
ccttgaccatgacagccagtgcaagatgaagagcagcgtcagaaccaagactactagcaatggcgtgaagccgtcggcaggtggacgggtcggattcggggagcattcagacccgcagattcttagcttgcttcgagcaaatgacgtcgacggccttcaggtgcttctgaacgccgacggcaaggaggtgtgggttcaggtgccggccgatccgtcagcgttctttgtcaatgttggtgacctcctccaggtaaaggcattgatttacttgtaaataaatcagtactagtagattaactgaatgaaattgcttcttggagcagcttagaaattaaattagcagactctgaatccaacaataaccaaacactaatacatggcgatattatctctcatacttggcttgaattcatctcttttccctttcttggtcgcaggctttaacaaatgggaagctggtaagtgtccggcacagggtaattgcaagctccagcagggcaaggctgtcgacaatctacttcgcagcgccgccactgcatgcgcgaattttggccctcgcagagacgatcacagccaacgcacccagccagtaccggcccttcacctgggccgagtacaaga

SEQ ID NO: 4725 - DNA, 609 bp, Zea mays
  misc_feature (383)..(384): n is a, c, g, or t
  misc_feature (386)..(387): n is a, c, g, or t
  misc_feature (553)..(554): n is a, c, g, or t
  misc_feature (590)..(597): n is a, c, g, or t
cgatcatcttctcctccaccaagaacgcccagctccccgacggccaagttcccgtgccggcgcagctcgtaccgtcgaatccggtgctgaattccgaggtctcaccggcgacagtgagccaaggtcctccagaccatcctcccggcgctcgtccgtcgccgcacagcggcgtggccaacggcaagcaaacgccacggaatcccgtcgctacctcgccgagccaggatgaccggtccggggcagggaaagagaaccagtcgtgcagcaacacgccgagcacgagcagccgccagtcgccgtcgcagcagaagacgcccaagtccagggcgacgccgccgcctgacaggcgcagggttactcctgctcagatggtgttcacaagnntnnggaatttatggatgcttgcaatgcacataagcatgagatgaatcaagtgagtacacattctccgaactcttatttattatatttctctacagcatctacacaaatgtcatttatgggtaatgcagtaactgggcataacaggaattttttcaccttctccaccgcnnccccaatgtagccactttccaaatacaccacttccnnnnnnnncccctccgacct

SEQ ID NO: 4726 - DNA, 677 bp, Zea mays
ctctggctttgtcacgttgtaccaccggggacagatcgtgcgcagttgttaagttctgatgtagcgctcgctcttcctacagttactaccctctatatcctcctgcccccggtgtgccgttagacttgtcactcgctaaggaagcgctggagatcccatcagcgccagatgttctcctccttccttctgatctcgcaccatttgtgaaggtaaacaacaaatttgcagcgcagtacagggcagcgcatctcttgtagaattctaattgatatcagtcaatatatatcgttcgaatcctgcccacccgtgagctcgttgttcagaagccaagtgcatccacatgtctgtcgtttataataaagtcacttcctttacttctgaatggggtgatgctaaacaggtactatgtttgcgcaggtgctactcctctcccttggagaaggtagcgacgacgacagacggtttatctgtgtgaaccctgggaggttggcgaagggtattggcgggggcacatttgtggagctttactacaacgagggcatcgacaagaccaatgcctccatcatccgcatataggatcgctgaaactagggtgcgccgcagaaaatcacgtacgtagtttttgagctcggaaaatccatctcagcgtttgttatcccaggaagtgttgcttaaca

SEQ ID NO: 4727 - DNA, 487 bp, Zea mays
  misc_feature (384)..(386): n is a, c, g, or t
  misc_feature (388)..(391): n is a, c, g, or t
  misc_feature (400)..(401): n is a, c, g, or t
  misc_feature (422)..(424): n is a, c, g, or t
  misc_feature (426)..(427): n is a, c, g, or t
  misc_feature (439)..(442): n is a, c, g, or t
  misc_feature (449)..(451): n is a, c, g, or t
  misc_feature (462)..(463): n is a, c, g, or t
  misc_feature (470)..(470): n is a, c, g, or t
gagggcaacagcggcggctggcaataaaagctcgcgtcgaccgcccctgccatgcctccacactcctccctgtctcggcttcgattccgcacttcccagttcccttcccacattcccacacccgcctgccttccttcccgtcgccttcttccccgctcctccgtgtcccactcccgtacgtgatacgccctcgggctcggagaaggaaaagcccgctctggcaccagctcctcctcctcgcatcgcatctcccctgccagggaccaggcatccctcgtcccggtacgtcgtgcctcctcacctccctttttccaaactctcgtctgctgctttacttcgccccgccccgccccgctggcgaggttgagtttattggtgctgccnnntnnnngatgctaannaggtactatgtttgcgcaggnnntnncccttggaaaannnngttacannnagggaggttannacgcacngagcactgggaggaggg

SEQ ID NO: 4728 - DNA, 410 bp, Zea mays
tctcgtcggacaccatgcctcgcctcaaacacctccgcttcaccgaggtcagcgtgacggcggatgacaccaaagccgccatcaccgtgctcgccgatgacctgaggactctccgcatgtcatgccggcgatgtagctatactgaatcgccatcgaagccgctcatgttcatgtgcgacggggacggcatggccgcattcaccaaatactcattggtccgcttacgcgcacccaagctggcggtgttcgagtggcgatgctgctacgctgacgaggtgtgcgtcgacgccgtgggtcgcctctccaacgtcgcgatcgagatcgccgccggtaggacacggacgagggctcccataggcacggaacctaagtttgtgacagtacaacaacgtgacaaacttatgaccgaa

SEQ ID NO: 4729 - DNA, 530 bp, Zea mays
tccggtggccatggccaagcccccgcttcagacagcaacgatcatcctgctcgtgctcctcttggccgcgtcgtgcctccacaccgtcgacgccgccgctttaggtaagtgcgtacatactactactacgtgcgagcgacgcccttagcgtggttgtcgtccgtctcgatctcgtgcgtgactgctggtgaccgctgacgccggtgctcgcgcgcatatgcatgctgcagggttctcctggggcaagtgttgcgttcggtgcgcgaggacgaccacgcggcgggcacgggaggcgtgcatgagctcctgcggcctaaaatgcgagttttgcaaatgcgggcctgcgatgccgccgcgcgacatccatgactgcccctgctaccgcaacatgctcaccgccagccccaagaagaggcccaagtacccttgagactgagactgcgaggccggctcacacgacggcatccatgggactgcgactgctgcttgcaactgcgattcgatccatgctgggccatacaacctgttat

SEQ ID NO: 4730 - DNA, 535 bp, Zea mays
ctctttccgatggccatggccaagcccccgcttcaaacggtcacgatcatcctcctcgtgctcctcacagccgcatcatggctccacaccgtcgatgcttccgctttaggtacgtgcgtacgtactactactatgtgcgagcgacgcccttagcgtggtcgtcgtccatctcgatcccgtgcgtgactgttagtgaccgcgcactaacgctggcgctcgcgcgcatatgcatgttgtagggttctgctggggcaagtgcagcgttcggtgcgtgcaagcgaccgcgggacaggcgcgggccgcgtgcatgagctcctatggcctctgctgcaaggcgtgcaactgcgtgccgcacgacatccatgactgcccctgctaccgcaacatgcccaccgtcgaccccaagaagaggcccaagtgcccctgagacagagactgcgaggctggctcacacgacgacatcaatgggacagcgactgctgcctgcaactacgatccaatccatgctgggccagacaacctattatgttatggt

SEQ ID NO: 4731 - DNA, 399 bp, Zea mays
ttccctgtgcatggcgcaaaaaaatctcccagccgtgcagtagctctgcgcgctcccctcggccaccatggcgccctcctccctactccctgctggcgagcagcagctccatggcgcccagatttttttccagcagagagcttcttccctgcaggttgccagcagccttctccctggccgccgagctccctgttcccctgctccaagggcgcgcacccacctcccagcgcccttcttccccctagcgctcgctccctgcaggcgagcagctcgaccccttcctccctgcgcagcagctctgcccactccaccttggtcagcgcagggcccctctgatccgagctcgagcagtgagctcaccgtcgctcatggagcccccactccctgctacactttctc

SEQ ID NO: 4732 - DNA, 383 bp, Zea mays
agccgttcagctacggcgccggccacgtgttcccgagccgcgcgctggacccagggctcgtgtacgacatgaccgtcgtggactacctcgacttcctctgcgcgctcgggtacaacgcgacggccatgaggacgatgaacaggggatcgttcgtgtgcccggccacccccatgagcctccacgacctcaactacccatcaatcactgcgcacggtcttcccgccggcacgaccacgatggtccggcgcaggctcaagaacgtcgggctgccggggacgtacacggccgccgtcgtcgagcccgaggggatgcacgtgtcggtgataccggcgatgctggtgttcagggaaaccggtgaggagaaggagttcgacgtgatttat

SEQ ID NO: 4733 - DNA, 407 bp, Zea mays
  misc_feature (398)..(401): n is a, c, g, or t
ggcggctattcacgagctggccggagctcatatctttccaagtgcagaacaactcgcttcagggcagaatcccaccggagctcggcaaggcgacgaagctgctaatcttatacctcttcagcaacaatctcaccggcgagatcccgccagagctcggcgagttggcgaacctgacccaactggatttgtcggcgaacctacttaggggatcgataccaaactcactcggcaacctgaagcagctcacgcggctggagctcttcttcaacgagctcaccggccagttgccgccggagatcggcaacatgacggcgctgcaaatcttggacgtcaacaccaacaatctggaaggcgagctgcctcccaccgtctcgttgctgaggaacctccggtacctnnnncagtgt

SEQ ID NO: 4734 - DNA, 724 bp, Zea mays
cagttcctgcagcacaagtgacgcgcaaaataaggcccagacagcaaatgcttatagaagcagcagctttatgaacccaataacagtgtgacacaaaaacactaaccaggaagaatgtttccacttttatcagtcatatcacgccttccgtgaacctcagggaaaagccttgtgtgatgccttttctgaacaaccacaaacgtcactgggggtagatatccctcctccaaagaagcacaagccttgaaatggaaagggacaaaaccattgacatgggcatggcaatgcaaaccatatttcaccgacaaattctgatgctggaaatcatacctttctgatagcatccatttcatgaaggagaacatggctgaattgaccttcacttacaccgtccctgcataggagtgataagtcaacatacttcactcaacagcatacaataaatgaaccaaaaacaggaatctggaacacatgcctatagaatattatcctctcaggctttctgtttgtcttcttgcggaaagcaatcagtagttccctgcaatgccagttacccagatgaaccattcgacaactttcaataggtcaactcaaatcaataaaaaaccttacctgatcatgccaccattaacgttgtgccccatctgtggatctttactgacagtaaataaatcttctattatctcttgtcggggtggttgagcagaaaccagacctctgtact

SEQ ID NO: 4735 - DNA, 731 bp, Zea mays
ctcgcgtgagtgccatccttgttcctctcgtggtcgccattgtcgtcgtcgtcgtgacgtcgatcctcatacatagctgaggcgcgctgaggctgaggctgacgacgctgctgcttgtgttcttggttcagagggaaccgaagggaggaagctgtcatgggtgcagaggatctcggcggccatcggcgtggccaagggcatccagttcctgcacgggggcatcatgccgggcctcttcgccaacaacctcaagatcaccaacatcctcctggaccagaacctcgtcgccaagatcggcagctacaacatccccatcctcgctgagaccgccaaatccgaggtaaaaccatgacgcacgcagccggcgccagccatttcttctacattctcaatctcaacggtgctgctctctttctttcttccttcctttctgtctgcgcgcccacctgtttgctgcatcgaatgtagggaggaggaggaggaggaggaggaagcaagtatccatctgacagcaggtacgtacgtgcggtacggcgcgcggtgaaggttactagctgctgttatgggatttctaacgcccatggcggaacacatgatgggatcttgttgccattccatcctgtagggtgccccccaatggcgacaagatcgacatctacgatttcggcgtgatcctgctcgaggtcgtgaccgggaggcccatcacgtccatacacgaggtggagggcatg

SEQ ID NO: 4736 - DNA, 378 bp, Zea mays
aacgcggagctggcctgctccggcgacgcctacttccacagcaccgaggacgcgatcgagctgaccaagaacggcatggacaaccacaacaacaaaagcgtcgggcggctggtgtacacgcagccgatacccctctggaacggcgacaccggcgagctcgccagcttcaccacctccttcaccttccggatcaagcgagcacaaccggggtccccgagcggcgacgggatggcgttcttcctcgcgcaccaccccggacgggtgccccccagcagcttcggcaggaacctgggcctcttcaacgacagcaccaacaggaacgccacgggcgacgaccgcgtcgtggcggtcgagttcgacacgttcgagaacgacaaa

SEQ ID NO: 4737 - DNA, 417 bp, Zea mays
ctgcgtgttcgtggtgctttgcttgctcttgttctgatttctgaagcagggcaccatcctgcgcctgcgggccacgagacgtgctctgtacatagcaaagggtgcgcgatatggatatggtgctggtgcggcagtgacctatatttggtgattgcatgacggggcgttcaagatgttaaattgagaagcagctgagttgtggttctagaaaggagaaatcggtttcgaaactgcaaaggacccttgagaagattatcagaagccatcgtccacatgttcatgcgcagacagtaacacataagccatcgtccacatgttcatgctactggtaatatagagcgtcagggaaaaaaatgcttcagtatctaaatgtcacgctaccattttgagcgctttgatgacctgtgcacctgtact

SEQ ID NO: 4738 - DNA, 978 bp, Zea mays
  misc_feature (60)..(62): n is a, c, g, or t
tttagcaaggtacacatgtagtgcccacatgtagatgcacacgttagaaatactctatannncacacttcatagctgtccttaacacgtcattgtttagttataactaaactgggagcagtagtacaatataaactgaaccctaagaatcaaacgaccctatttgggaaacactggaaatttagcagacattgttgaatattaatgtactaggaaaagatggttacttttgctacttgagttttttgaggaaattttaacattttgcccaaaactgaggtgtgtgtgatcttgtccttgtggatttcactatgaaatatttccacgaacattccacaagttaaataatatttctagcgtggagtggtttagaagacattgttcgattctgagcattgcattgatcataaggtcttccaagtgtacagtatggataaccatgtctcaacatgtactgactactagcttaaggaaaggtttgactaatatttttttatgattggttatatacatacatggtgtgatgattaaattataagccaattaacatacttttcactatgtatatgaaggcattgcaagaaagtacagactcaatagaccgtgtggcttgttcagcgactccactagtcacagaaaaactttgggtggaaaagtatgcaccgaattctttcacagagctattgagtgatgagcacacaaaccgagaggtaaagctattccaaattgcatcttgctacttcaaagtcaaggtttccgtctttttcctaacatctttcacttgacatgtgtatgtgccttgctcaggtacttctatggctaaaacaatgggactccattgtttttggatcccatattcgggctacaggtgatgatgtcttgtctgccttacgtcgacactcttcaaccatccaaaagaatgcaagtaacagaaattcttttccaagagtaaggggggtcctgtgcaagtcaagatgca

SEQ ID NO: 4739 - DNA, 392 bp, Zea mays
atcgttcattctttagtatttattaacaactatattctatgctttatattcttacagtagaagattatatatgttcaaccaaatggacataattagtgctgttttgcaaaagcattttggattttccagtctcaaagcattccaaaaggaagtcttggatgcttggtttggtcatgaggattgtgttctcctagcagccataggatcaggtgcgttttctgtaattctcctctttatcttctgtaatttattactaccgctgatgtgactttgctttttatatgggttgtaagtgtcagtaatcttttttcataacttctatcattattgaatacttatattttgtatccttttttcgctgaaccttcttgccttatgtctgaacatgcaac

SEQ ID NO: 4740 - DNA, 410 bp, Zea mays
tcgttgctcggcggcggcgacagcatccgctcaaccccagccatgttgttgcccaggagctcgttggccagctcatcctcgagatcgttctccaccagccgcttgacaccgcggagcacatggagtgccaatccgtcggcgagcctgagcactatgatcttccagtacgcggtcagtcgtgccctcaagtcgaatgcctgcgctgctaagtcagggtgcgtcctaagatgacccacgttcacttccccgaagcattccagggtaaccttagatggctcggacttgttctccacagaacccatgaacttcttctggcctaccattatggcttcccaagtcttcatgtagtcagggctcgccgtgtagcctgccaccagctccatctctatcatctccttggacgtgctgag

SEQ ID NO: 4741 - DNA, 517 bp, Zea mays
  misc_feature (360)..(360): n is a, c, g, or t
  misc_feature (386)..(386): n is a, c, g, or t
  misc_feature (440)..(445): n is a, c, g, or t
  misc_feature (448)..(448): n is a, c, g, or t
  misc_feature (492)..(494): n is a, c, g, or t
  misc_feature (501)..(502): n is a, c, g, or t
  misc_feature (505)..(508): n is a, c, g, or t
cctacgacggcaaggccattgagctgtggctgagcacgaacgagacgtccccgatgaccaacctgcgtttgcccaacaagagcctgataccgaatcactcccttcgttctgcgatcatggactggaggtcgagaagcaagtgacttgtgatcgtgattcgttcagccctcgggattgcatgcttcttgatgccgcagcggtgaccgatttgtcttgcacaacgaagctgccaggggtttttttttgtttattttgttctaagaaatgtatgcgagtagtattcagatagggttttagaggttgtgcagcagctcaagcaaaaatgtaaaaaaaaaaacgtcatctgatagcattacctcnctgtcaggggatgccctttttttttncttttttgcttgagctgctgcacaacctctaaaaccctatctgaatactactcnnnnnnttnataaaaaaaaaaaaaaaaaaccctgggcatcttctttgtgacannncaatctnnccnnnngcggtatca

SEQ ID NO: 4742 - DNA, 361 bp, Zea mays
gagggtgcatcaaggcgaagcaactccgtgtgaaggacgtggccgttggatcgaaaacctaggagttggtccatttcgcccccggtggagtggataggctctatgtaaataggggtagtttaggaagtgagaataaccctctataaatagaggggagggctggttggttcagcatcccttggctgccatttgttttgagcactcattctagagctcctagttttctctctaggtagacaccagttgagccgagggttccgcagtgattttgtacttcgactgtgttcttgattttcaagtttaatcagaggaaggatcgccggtccggcccacagggctcattggcttcaaatctcagttt

SEQ ID NO: 4743 - DNA, 632 bp, Zea mays
  misc_feature (490)..(492): n is a, c, g, or t
  misc_feature (496)..(503): n is a, c, g, or t
  misc_feature (509)..(514): n is a, c, g, or t
  misc_feature (519)..(519): n is a, c, g, or t
  misc_feature (526)..(528): n is a, c, g, or t
  misc_feature (530)..(532): n is a, c, g, or t
  misc_feature (536)..(543): n is a, c, g, or t
  misc_feature (545)..(548): n is a, c, g, or t
  misc_feature (555)..(555): n is a, c, g, or t
  misc_feature (558)..(560): n is a, c, g, or t
  misc_feature (564)..(570): n is a, c, g, or t
  misc_feature (579)..(585): n is a, c, g, or t
  misc_feature (587)..(603): n is a, c, g, or t
  misc_feature (605)..(607): n is a, c, g, or t
  misc_feature (615)..(615): n is a, c, g, or t
  misc_feature (617)..(622): n is a, c, g, or t
  misc_feature (627)..(629): n is a, c, g, or t
atgtcctcgacctccctctccgtcgacgacctcctcaggcgggtagcgggtacggtagggaggttggatgctggcgccctcagccagcccccgatgcgtcctgaccgtgggtatgtgtccctggtaagtgtccggtcctcctcttgctttccgccgagttttttatgttttcagctcttactgttgggattttcgttcgtccccaggggttgaggagttttaaactctcccttccaccagtcccggaggacgcggcggaccgaaccgcgcgtaggctcgccgcggagaaggacaaggagaagaaggacgcggaaaaggcccgagctcgtgagaggatgcgagctcgggaagccttggagaagcgccgtcggaggcaagcaagggacagactcccgttggagtcgttgccggacacgcctgatgacgacgatgatgatgatgatgatgatgacgaagatgatgatgatgatgatgatgatgatgatgatgnnnatgnnnnnnnngatgannnnnnagtcngatgacnnngnnngccnnnnnnnncnnnntccgccnacnnncctnnnnnnngcccaaacnnnnnnntnnnnnnnnnnnnnnnnnannntatttctntnnnnnntcttnnnctc

SEQ ID NO: 4744 - DNA, 372 bp, Zea mays
acttgaggtcgaggccaacgttgaccccgttgtaggcgatcggagcgaacatccacatatcatccgagctcaaaagctgcgcataatgaaaatgttttgaatgctactagtacatgaaatgaaatttcagcgcacgccagcaacaagattttggctataggggctagaatagaattttgcaagaaccaaccttgatctggagctgcaagaacttgacgtattgagctgcctcttcaagcatcgtgctgatatctacctgaaaaaacacggtcgtatgtatgcacaaacgttagaacgactagtcgttatcttaagcttttctgcttaaaaaaaattactgcgagttatttctgttgtcgatctctcaagcac

SEQ ID NO: 4745 - DNA, 777 bp, Zea mays
tctggtaacagttcgactgtacaaaactccagtcttccgggtaggttctatccatattgctcgttcaagatattctgctgcttcctctcctgcgcgcggcggcgtgcagaacgatacaactgggagtcaatcaatgtaatctgatttcaccgtcataaattatgatagaacaagcatatgctcacctgagctagacgacgctctttattcaacttcagagctcttcctttctcttctccggatctgaacattttctgaacgcatgcaaacagattctttagagaactgtcgctatgcccatgtcttgatgcctatcttactggtgactgttttttttccccaaccaacttagaaatgatacaatataatgtgcccaatacaatccaatagctatgaaaaggttaccttttcggtggctgacatgttttcagtacgatcaattttgatgtcaaagacctcatgcagcaaatcgttgtcctgcacagacaaagagaagctttaacactattataccaaaatacagtattccacagaaatatcaagttctgcttatgataacctgtgaatgcttcaggaatccccgcccaagaaaccgcctcatatagttcaactaagaaatgaacaacaaatctcagaaaaatttcaaattcggagcacagcattttgaggaaatgaaaatcaattcaagaaacggacacctgtattgattcacgccatgatgtaactcttaaaatgccattcttgcctgaaatcctaagtgattcttcagggcactca

SEQ ID NO: 4746 - DNA, 405 bp, Zea mays
catgtctgttctgcaccaagtagaaacaaaacttgtgaattgaaactacggtctgagattgaagaacagtgccagaaacatgagttagatgtagatgaacgtggcatgggtcctagcaaaaactctcgtgtgctaataggatctataattgtcgcaattaaagattgtagtgaacacttgctggacttaggttccaagaatgacccagtacctcccaatgtaaagacaaagaaacatgcatcagtcaaggtggtgcaacaagttacccatgagggaaacagaaatgaaggtgttcctgatagtgataaccgttctagcctcagtgttactacagatgaaatcagttattcaacctgctgcgatgcagatttggcagtggatgaacatttacaatgcaccacgtaa

SEQ ID NO: 4747 - DNA, 381 bp, Zea mays
ctctcccgagtggagtccttcctgactcctgagacctgaggtggaggaacatggaagtggagaagccgcatactaggaaacccaaggggagggagttgtgaggtagagggacatggaagtggtggtgacaagtatactaggaacgccaaggggagggagctaggaggaaccgcaggaggtccggactttctacgacacaagcagacggctaggccggaaccgccaccgccagcaaggatccaggagtccgggtccgcttttctcgtcccgcccgcaaagatcgatcggaacaactagcctagccctaggccctagcccagagccctgccctgcgcaccaaagcggaggggagagacgggagactagagagagcaaatacga

SEQ ID NO: 4748 - DNA, 411 bp, Zea mays
ataaaatggacttggtgacaagatgcatcgatttatctgagaatcgattatgcattatgccaaaacgagaaaacgcaactacacctgaacgtctcccatcattcttttctcgcttttcagcgtcctgggtctattcgaaaatactcacattaggtgtctctgtttatgaaagagaccgcaggtaagttgcaataactgctataattacggatcggatcaaacactctcattagatgcatggttttcgtgtttcatagaattttggttgaaagtggaaaccttagccacacaagcattcttgtctgatgtgtttcactttcacatgccttctggtttatagtacatattgggacgttttaagtgtgatatactgatatgtgatagatacttgaccatatgacgcaatggtaa

SEQ ID NO: 4749 - DNA, 389 bp, Zea mays
caggcgcttccagcaccagaagattataaggagcctgaacctgagaaggtggaggaagaggtgaagccagagccacccctgcagccacagggtgacttggtggatctcagagaagatactgttagtgcagatgagcaaggtaacaggcttgctctagctctcttccaggggccaccagctgctggtggaagcaacggttcatgggaggctttcccttcaaatggtggcaaccaggtgacttcggcctggcagaaccctgcagctgaacctgggaaggctgattgggagcttgcccttgtagagacagcaagcaacttgtccaatcagaagccagcaatgtcaggtggcatggacccgctgctgctgaatggtatgtatgaccaaaaaaa

SEQ ID NO: 4750 - DNA, 407 bp, Zea mays
gctgcacggtactataagtataagacacaactaaaacacaacataatacagtggtcatgtctaaaacatgtgtcttaccatattcattctaccaatcagagcattcaataaattaaagtgaccaatcagctagtcttctgtctcgaacatagagctaagacactgtgtcttcgtcaagatacatgtcttgagtttttttacattcaccccctagacacactctaagacacaacttaagacacccattgtacatgccctaaggggagtcggggtacggaaatggctatcctgccaattcaatcccagcgggagagttgggccttgtcatctgatggctatggcggcgatcttcaacttttggctccagcacctgcggctagccactcctgtactcaagaaagggagca

SEQ ID NO: 4751 - DNA, 393 bp, Zea mays
gctgcagtgcagtcataagcgtactagttagtgtcatgtcatctcatcaggactctgattgatcaaatcaccgtacgtgcacccggcccgcagtgggcgtgcaccacgagcgtggacttctcgctggcgcagctgatccaggtgatcatcctgctgagcaccggcggggccaacggcggcggctacctcgcctccaagtacgtcgtgcttgccatctacaccgccatcctcgtcgtgcacggcctcatcaacagcctgcacatccagtggctctcctggttcggacagctcggagccttgtggaacgtcgcgggcgtgttcgtcctcgtcatcctggtcccgtcggttgccaaggagagggcgagcgccgagttcgtcttcacccacctcaac

SEQ ID NO: 4752 - DNA, 656 bp, Zea mays
  misc_feature (196)..(196): n is a, c, g, or t
  misc_feature (340)..(342): n is a, c, g, or t
  misc_feature (344)..(344): n is a, c, g, or t
  misc_feature (346)..(346): n is a, c, g, or t
  misc_feature (348)..(351): n is a, c, g, or t
  misc_feature (353)..(354): n is a, c, g, or t
  misc_feature (364)..(365): n is a, c, g, or t
  misc_feature (367)..(368): n is a, c, g, or t
  misc_feature (372)..(378): n is a, c, g, or t
  misc_feature (406)..(406): n is a, c, g, or t
  misc_feature (408)..(408): n is a, c, g, or t
  misc_feature (410)..(410): n is a, c, g, or t
  misc_feature (413)..(413): n is a, c, g, or t
  misc_feature (419)..(423): n is a, c, g, or t
  misc_feature (428)..(429): n is a, c, g, or t
  misc_feature (433)..(436): n is a, c, g, or t
  misc_feature (448)..(448): n is a, c, g, or t
  misc_feature (452)..(454): n is a, c, g, or t
  misc_feature (458)..(465): n is a, c, g, or t
  misc_feature (470)..(472): n is a, c, g, or t
  misc_feature (474)..(474): n is a, c, g, or t
  misc_feature (490)..(491): n is a, c, g, or t
  misc_feature (493)..(497): n is a, c, g, or t
  misc_feature (507)..(515): n is a, c, g, or t
  misc_feature (517)..(524): n is a, c, g, or t
  misc_feature (529)..(537): n is a, c, g, or t
  misc_feature (542)..(542): n is a, c, g, or t
  misc_feature (544)..(546): n is a, c, g, or t
  misc_feature (548)..(552): n is a, c, g, or t
  misc_feature (554)..(554): n is a, c, g, or t
  misc_feature (556)..(564): n is a, c, g, or t
  misc_feature (567)..(568): n is a, c, g, or t
  misc_feature (571)..(575): n is a, c, g, or t
  misc_feature (577)..(581): n is a, c, g, or t
  misc_feature (584)..(585): n is a, c, g, or t
  misc_feature (587)..(591): n is a, c, g, or t
  misc_feature (593)..(593): n is a, c, g, or t
  misc_feature (595)..(595): n is a, c, g, or t
  misc_feature (597)..(604): n is a, c, g, or t
  misc_feature (609)..(615): n is a, c, g, or t
  misc_feature (618)..(631): n is a, c, g, or t
  misc_feature (633)..(633): n is a, c, g, or t
  misc_feature (635)..(648): n is a, c, g, or t
  misc_feature (651)..(653): n is a, c, g, or t
acctctgcagcagcagcgatggtcccaggacggacgctaccgctggaaggctctcgttcgcgtccccactcgagggacgagaaccagacattaaagccaaagagccggaggtcggtccgcgggtggcgctgacggtctcgtcagcggagaagctttctctagctgccaccacctcagcaccggcacgcgggatccncctgcccaccaacaccgcaccagcgagcaccggccgccccaaagcgcactggcaggtcctcactctcgtccttgccgcaaaaacgagaacgggactgtcccagaacacgaacaccaaaagagccggaggtcggtccgcgggtgnnncngncnnnntnntctgcggagnngnntttnnnnnnngccaccacctcagcaccggggggggggnangnctngccccnnnnncccanncaannnngggcggggggcngccnnntgannnnnnnngggcnnngntcccgtccccgccccnnannnnnaaagagagtnnnnnnnnncnnnnnnnncaacnnnnnnnnntatgnannncnnnnngnannnnnnnnnccnnttnnnnncnnnnngtnncnnnnncntntnnnnnnnntcatnnnnnnnctnnnnnnnnnnnnnntnannnnnnnnnnnnnnatnnnccc

SEQ ID NO: 4753 - DNA, 368 bp, Zea mays
tctctgcagggctcgcacgtgctctttttccctcctcaccccgaattaacaatcgcgaaatcccaggtttgacctttcccccagccttgttgttccagtggggcccactacacccatgtccccttcttcctcgcacacgcgggacactgcacctgagcctctcaagccctcaacacgccaatttgaccacgtgaccgtaatcttgatccacggcctccttgcacttgcaccgcaccggtgcctatttaacccgcgctcgaacaactctctgccggcaacgcaaccaaaccgctctcgctctcggctctcggctctccaccagtctccgctctctggacgccggaaatgcagatggactcctacaacaa

SEQ ID NO: 4754 - DNA, 433 bp, Zea mays
gcagcatgttacaattgtcaaaaagaatacaagctatgaactaatagtctctaatatcatgcaagcctgtatttagatacaacagcagccccataaaacgtcagcgctgcaacggttctgcactccgtgacaattctcactgaaggcagcaatgcaagcctaacgggagtgggaccactttttcacaagcaaaagcaactgcaagagtgcaagactggacagatgatgccaaaatgtcactttcagcccgggccaaaaaacagaaacaataataaataaaataaaaacaaacagatacgtattgatcatagtgggatttgaacccacgacctttagattcggaatctaacgcgatatccacttcgctatatgaccatgcttatcttttgcacatttacaaaatctaaaatggcaaaggtatcagaatccagaa

SEQ ID NO: 4755 - DNA, 387 bp, Zea mays
gtcttctgtacccagtactctattgctattttattttatcacaaccggcaacggacacacactatcagaattacactcacggcaacacaggtgatccatgagcccgcagcacaggggtccagttcctgtcatcgttttgtctgaacaccagggtccaggcagccaggcttataggtttgagaatgaactaggcagcttcggtgctccctcgaaagcccacgacgagataaggtggtgagcaatggcgtagggtcctgggacaaacattggagcaggctcgccgcttccaactttgaagtcggcagaggggttctgccctttctcagcgcccttgcagatctgatcgaccttggcagcgcttgttctctgggctttctcgtattcaag

SEQ ID NO: 4756 - DNA, 401 bp, Zea mays
ctcgagctcctgccggcacccagcaacaagagcgtccttatcggcggcatcaatcactgggctattagaagccctcttccgcttcagctgcttctgcacctccatgatagtatcaatcagcgtcgcaggagactgttgtgttgcctccaccggctggcctgatggttgttgaactgggacgtcatcgacggccatcgaatcatccgagacgagctcagcggattggttgagaacaacgggaccatcgacctgcatctgcgatgggcccaaatcgtcccgtggcccaccgccgttgcggtcaggggactcctcgggacgaacaacaccgagtaccatggcgccgctttccatcgcgggaagacttggatcttgcaggtgctactctaggaacaaacagcgca

SEQ ID NO: 4757 - DNA, 399 bp, Zea mays
gctctactgaggcacctgcatctaaggtgggtgatgctgaagcatcagaaacatcacaatctgcaggacatccttcaacagtggaagaaaaccagcaccatcaagttagcaaacattctggtcctagtgatgaagcagagccgaatcagcttagagagtctgttcgagacttacctgatggtagtgcatcttcttcgcctactaaaatacatcaatcaggtgacaccgaaacaggggaatctattcacacaggaaaggaagatacatctgataggaacatcttgcagtcacaaccagcagagtctgcgctagctagttcagatgatataacggaggctgaggacaatattgctcaagaatatgatgccccaaaagaacttagtggcccacaggagagta

SEQ ID NO: 4758 - DNA, 564 bp, Zea mays
tcgggtccggcctactctcccttagttgctatgtatttttcctgcatatgaattagattatttcatcgtagttatgatttaagtttttttccataaatgtagtagggtaattagaaataagtaaatagtcacgcgtagaaccaaaatacaaaatttttgcttggattctcttgcaggaaaaactactcacggtcaacaatctcgccaccagtgggtggcctcatcagccgtcttgtgccttctgcaacggaacccttgagactggtattcacctgtgtctacattgtcctttcgcccgtgcggtgcggagacaaatcctggcttgggaaggtgtaatcctccctgcccagtctgaccttgcttccgccaccaacattcgggaagtggtgggaagctgcgactcccccactaccaaaaaatcagaaacgcgctttcaatggaatcatgatttacacaatgtggaacctctggaaggagaggaatcgcaggattttcgaaagcgtcgcccttcctccggtccaagtcgccttaaaaattaaagaagatgtttcacaatttaggcgg

SEQ ID NO: 4759 - DNA, 369 bp, Zea mays
  misc_feature (57)..(60): n is a, c, g, or t
  misc_feature (62)..(63): n is a, c, g, or t
taggattggatcggattaggatcgggtcctattactattcatttttgaactaaaatnnnntnnagggccctaccattttgtgaagaagcatttggatcgtgatccattaccacccctagttctatatcatctaacttctgtgatcctaaattaatgacaaagttggaccttagccataacaatttctaagggagcatacatgttccctaaatcttactttgaactcatctcgctaaatctttcatcaaacaaatttagtggcgaaattcctaaaactttatgaagacttgaacaactaaaggacattcaaatggaccacaacattcttactagaaacattccgtccacattcagcagtctacacagctt

SEQ ID NO: 4760 - DNA, 472 bp, Zea mays
  misc_feature (397)..(401): n is a, c, g, or t
  misc_feature (409)..(413): n is a, c, g, or t
  misc_feature (416)..(421): n is a, c, g, or t
  misc_feature (426)..(426): n is a, c, g, or t
  misc_feature (428)..(434): n is a, c, g, or t
  misc_feature (461)..(461): n is a, c, g, or t
  misc_feature (463)..(463): n is a, c, g, or t
  misc_feature (465)..(468): n is a, c, g, or t
ctcttcggcgcggcggtgaactctcagatcacgctcagcatgccgccgcatctcgtggtcaccaaggtagcgatgtgggctaccgtgctcacccccgttaccaagtacgcgcttgagttcgcgccgtttgccatccagctccagcaccacctcccagagagaatgggacctcgcgcgcgcatgttcgtccgaggtggagtcgggtcggcggcgctccttgtaatcctggcgctcgccctctgcgtgccgtacttccagtacgtgctcagcctcacaggctcgctagtgagcgtggcgatcagcgtcatctttccctgcgcgttctacctcaagatctactggggtagagtgcccatgtccaccgtcactatcaacgtggtgttgattatgttcgatnnnnngtggcatnnnnngannnnnncgggncnnnnnnngcttcttttgttgggggggggggcttncntnnnngtga

SEQ ID NO: 4761 - DNA, 1556 bp, Zea mays
  misc_feature (62)..(67): n is a, c, g, or t
  misc_feature (365)..(365): n is a, c, g, or t
  misc_feature (373)..(374): n is a, c, g, or t
  misc_feature (376)..(378): n is a, c, g, or t
  misc_feature (383)..(398): n is a, c, g, or t
  misc_feature (403)..(404): n is a, c, g, or t
  misc_feature (408)..(408): n is a, c, g, or t
  misc_feature (410)..(431): n is a, c, g, or t
  misc_feature (436)..(446): n is a, c, g, or t
  misc_feature (448)..(449): n is a, c, g, or t
  misc_feature (451)..(456): n is a, c, g, or t
  misc_feature (462)..(462): n is a, c, g, or t
  misc_feature (466)..(470): n is a, c, g, or t
  misc_feature (472)..(475): n is a, c, g, or t
  misc_feature (477)..(483): n is a, c, g, or t
  misc_feature (488)..(491): n is a, c, g, or t
  misc_feature (494)..(501): n is a, c, g, or t
  misc_feature (503)..(523): n is a, c, g, or t
  misc_feature (529)..(545): n is a, c, g, or t
  misc_feature (547)..(552): n is a, c, g, or t
  misc_feature (554)..(564): n is a, c, g, or t
  misc_feature (568)..(569): n is a, c, g, or t
  misc_feature (571)..(586): n is a, c, g, or t
  misc_feature (588)..(591): n is a, c, g, or t
  misc_feature (593)..(593): n is a, c, g, or t
  misc_feature (595)..(600): n is a, c, g, or t
  misc_feature (608)..(609): n is a, c, g, or t
  misc_feature (616)..(620): n is a, c, g, or t
  misc_feature (622)..(629): n is a, c, g, or t
  misc_feature (631)..(631): n is a, c, g, or t
  misc_feature (633)..(642): n is a, c, g, or t
  misc_feature (647)..(656): n is a, c, g, or t
  misc_feature (661)..(662): n is a, c, g, or t
  misc_feature (664)..(672): n is a, c, g, or t
  misc_feature (683)..(687): n is a, c, g, or t
  misc_feature (690)..(692): n is a, c, g, or t
  misc_feature (694)..(695): n is a, c, g, or t
  misc_feature (697)..(699): n is a, c, g, or t
  misc_feature (704)..(715): n is a, c, g, or t
  misc_feature (717)..(717): n is a, c, g, or t
  misc_feature (719)..(731): n is a, c, g, or t
  misc_feature (733)..(734): n is a, c, g, or t
  misc_feature (736)..(745): n is a, c, g, or t
  misc_feature (748)..(751): n is a, c, g, or t
  misc_feature (755)..(756): n is a, c, g, or t
  misc_feature (759)..(770): n is a, c, g, or t
  misc_feature (772)..(777): n is a, c, g, or t
  misc_feature (784)..(787): n is a, c, g, or t
  misc_feature (790)..(790): n is a, c, g, or t
  misc_feature (794)..(801): n is a, c, g, or t
  misc_feature (805)..(818): n is a, c, g, or t
  misc_feature (821)..(840): n is a, c, g, or t
  misc_feature (842)..(848): n is a, c, g, or t
  misc_feature (850)..(861): n is a, c, g, or t
  misc_feature (863)..(865): n is a, c, g, or t
  misc_feature (870)..(879): n is a, c, g, or t
  misc_feature (883)..(901): n is a, c, g, or t
  misc_feature (904)..(907): n is a, c, g, or t
  misc_feature (909)..(922): n is a, c, g, or t
  misc_feature (925)..(930): n is a, c, g, or t
  misc_feature (932)..(940): n is a, c, g, or t
  misc_feature (943)..(944): n is a, c, g, or t
  misc_feature (949)..(967): n is a, c, g, or t
  misc_feature (969)..(981): n is a, c, g, or t
  misc_feature (983)..(997): n is a, c, g, or t
  misc_feature (1000)..(1006): n is a, c, g, or t
  misc_feature (1009)..(1023): n is a, c, g, or t
  misc_feature (1025)..(1029): n is a, c, g, or t
  misc_feature (1031)..(1049): n is a, c, g, or t
  misc_feature (1051)..(1069): n is a, c, g, or t
  misc_feature (1071)..(1075): n is a, c, g, or t
  misc_feature (1077)..(1088): n is a, c, g, or t
  misc_feature (1090)..(1105): n is a, c, g, or t
  misc_feature (1107)..(1134): n is a, c, g, or t
  misc_feature (1136)..(1144): n is a, c, g, or t
  misc_feature (1146)..(1168): n is a, c, g, or t
  misc_feature (1170)..(1176): n is a, c, g, or t
  misc_feature (1178)..(1208): n is a, c, g, or t
  misc_feature (1211)..(1216): n is a, c, g, or t
  misc_feature (1218)..(1306): n is a, c, g, or t
  misc_feature (1311)..(1318): n is a, c, g, or t
  misc_feature (1324)..(1348): n is a, c, g, or t
  misc_feature (1350)..(1373): n is a, c, g, or t
  misc_feature (1375)..(1384): n is a, c, g, or t
  misc_feature (1386)..(1392): n is a, c, g, or t
  misc_feature (1394)..(1400): n is a, c, g, or t
  misc_feature (1402)..(1405): n is a, c, g, or t
  misc_feature (1407)..(1433): n is a, c, g, or t
  misc_feature (1437)..(1455): n is a, c, g, or t
  misc_feature (1457)..(1463): n is a, c, g, or t
  misc_feature (1465)..(1469): n is a, c, g, or t
  misc_feature (1471)..(1479): n is a, c, g, or t
  misc_feature (1482)..(1537): n is a, c, g, or t
  misc_feature (1540)..(1553): n is a, c, g, or t
cggttcgtggcaacttcgccagtgcttaccagcagcacggtgtggaggcccacctccatgcnnnnnngcaggagcccgaggagaccctccgaaagttcatctcccgcttcactaaggtgcgaggtacgatacctcgtatttctgatgcttctatcatcacggccttccgacagggggtacgagatgaaaaaatgttggagaagttggccacatatgacgtggaaactgtccccacgctcttcgctctggccgacaagtgcaccagagccgccaagggccatgcatggcactcggccccacaaactggagctgcccagtcgggtggctcgggggccgtcccccgggacagaaagaaaaagaaaaanaaaaaaannannntattnnnnnnnnnnnnnnnntgtanntgtngnnnnnnnnnnnnnnnnnnnnnnatggnnnnnnnnnnntnnannnnnnattttntttnnnnnannnngnnnnnnnatttnnnngtnnnnnnnntnnnnnnnnnnnnnnnnnnnnnattttnnnnnnnnnnnnnnnnnannnnnnannnnnnnnnnntatnnannnnnnnnnnnnnnnntnnnngngnnnnnntttgtttnntatttannnnnannnnnnnnanannnnnnnnnnagaannnnnnnnnntatgnngnnnnnnnnnattaagattannnnnggnnngnntnnnatatnnnnnnnnnnnnanannnnnnnnnnnnngnntnnnnnnnnnnttnnnntatnnttnnnnnnnnnnnnannnnnntaaaaannnngtntaannnnnnnntttnnnnnnnnnnnnnntannnnnnnnnnnnnnnnnnnntnnnnnnnannnnnnnnnnnnannnataannnnnnnnnngagnnnnnnnnnnnnnnnnnnnttnnnnannnnnnnnnnnnnnaannnnnnannnnnnnnnaannaatannnnnnnnnnnnnnnnnnnannnnnnnnnnnnnannnnnnnnnnnnnnntgnnnnnnnatnnnnnnnnnnnnnnnannnnnannnnnnnnnnnnnnnnnnntnnnnnnnnnnnnnnnnnnntnnnnnannnnnnnnnnnntnnnnnnnnnnnnnnnnannnnnnnnnnnnnnnnnnnnnnnnnnnntnnnnnnnnntnnnnnnnnnnnnnnnnnnnnnnnannnnnnnannnnnnnnnnnnnnnnnnnnnnnnnnnnnnnttnnnnnnannnnnnnnnnnnnnnnnnnnnnnnnnnnnnnnnnnnnnnnnnnnnnnnnnnnnnnnnnnnnnnnnnnnnnnnnnnnnnnnnnnnnnnnnaaatnnnnnnnnataaannnnnnnnnnnnnnnnnnnnnnnnngnnnnnnnnnnnnnnnnnnnnnnnntnnnnnnnnnntnnnnnnnannnnnnntnnnnannnnnnnnnnnnnnnnnnnnnnnnnnntatnnnnnnnnnnnnnnnnnnnannnnnnnannnnngnnnnnnnnnaannnnnnnnnnnnnnnnnnnnnnnnnnnnnnnnnnnnnnnnnnnnnnnnnnnnnnnnttnnnnnnnnnnnnnnttt

SEQ ID NO: 4762 - DNA, 406 bp, Zea mays
tgttctgtgaatgcattttcgtcgtgcttcaacaacagggaccggactacatggtccgcaacgcaaggaggtccatgctggaggagctggaggggatgctggagatcgtggagcctcagccgccggggaagccgaggacgcttagccgcaggaggttcgatctcccagaaggcggagccatcgaaaaggagacgcgggaggcgggcaagtgaagtgcatcggtgggtggtggcatgcttgggcagtttggtatatgcgcgatgcggactatagagtttgagtttgtgctgctaccgaaccgtggaccaccttaccccgttgagatgtttgatagctggactttttgtgctgttgtatttgtagaccagaacgttgttctttgtaataaattggcgtgtgctgaggg

SEQ ID NO: 4763 - DNA, 392 bp, Zea mays
cagactggcgccattggtgatcatccagccgagcgccaggctcgcgaagaagttgtcctgcaacttctccgtcagcagcaccggcttcaaggagtcgtacatgccgaagtagaggccgcgatacacgacgatcccggccacggagacgttgaacccgcggtagagccccacgacgccgtcggaccggagcgtcttccggtacacgtcgacgaggccagtgaactgcctctcgccgcccttagccgccgccctgtagtcgctggtgaggcgcgtcctggcgtagtcgagggagtagacgaagagcagcgacgtggccccggcggcgctgccggaggcgatgttccccgcgaaccacttccagtagccgtccctgtccttgttgaagttgaaga

SEQ ID NO: 4764 - DNA, 669 bp, Zea mays
  misc_feature (562)..(562): n is a, c, g, or t
  misc_feature (572)..(573): n is a, c, g, or t
  misc_feature (580)..(581): n is a, c, g, or t
  misc_feature (593)..(593): n is a, c, g, or t
  misc_feature (596)..(597): n is a, c, g, or t
  misc_feature (599)..(599): n is a, c, g, or t
  misc_feature (601)..(601): n is a, c, g, or t
  misc_feature (612)..(612): n is a, c, g, or t
  misc_feature (620)..(622): n is a, c, g, or t
  misc_feature (632)..(639): n is a, c, g, or t
  misc_feature (643)..(645): n is a, c, g, or t
  misc_feature (658)..(663): n is a, c, g, or t
tttgttggcaccacacttttaatctttcttgcactggtacactacttctaagttctaacaatggaatatggatgatgttttttggtatttttcttgcactggtacactacttcaaacctgaatgaatatgaatgttgtatttttcttttaatattagaagtacttgtttttcttgataaggactaaaaatacttgtatctgggtgaacctctgactgtattatcatcatgataacccacaacttttcctagggtctgcatgaaatttatcacaagcagatgaatttcaagagacgatacactggcttgatgttaaaaataaaatgacatctataagggccgtgacttgtgattcttaccatgatttattgaggataacatgggttgtctcttatcagtctggagtaaagaagcactaatagactaactggtgcaggcaggggttgtatctaactcatcagatctgtttattttgttttgttgactatcgaactatcagaatgaaaagaaatcctgattggacttaacaatctgcagattccaacattctccgagaatacagnatgacatcanncacaganngcattgacgcgntcnngncnactcgggttgntgtcactnnngatgtgagcnnnnnnnncaannntgccctgactggnnnnnntttcta

SEQ ID NO: 4765 - DNA, 548 bp, Zea mays
  misc_feature (364)..(364): n is a, c, g, or t
  misc_feature (384)..(390): n is a, c, g, or t
  misc_feature (395)..(402): n is a, c, g, or t
  misc_feature (405)..(406): n is a, c, g, or t
  misc_feature (417)..(418): n is a, c, g, or t
  misc_feature (439)..(439): n is a, c, g, or t
gattggggcttcccgtccataagcacaaagatagaaccactggaaaggggtgtacaggtaggaaagtacgcaccgatatctagttcgatatggtgcaacaaggtcatcacgacgtccttcatcagttagtgctcatggatccttacattgacaagcacctagaagagatccgcgtcgctaaggacagaactcgcatggaggcatgggtccagaaacaacacaagatcagtttcacggcgtggctaaaggagcaaaacattccaagtggaggatcagatgatgagtccaccaccgccgtgaggcttgcgtccggcccgtccacccaaatcactatgtggctagggtacgacttcaatggataaancccaacgcacatgtccctgnnnnnnncgaannnnnnnnacnnttttctctcgnnaatctgtgcaggcatgtaggngacgttcattaagaaaagtgaacgatctgcaaataatgatgataagtttactaacttatatatgaagcatttagatgatgacataacagaggaacttgttaaattgaag

SEQ ID NO: 4766 - DNA, 558 bp, Zea mays
gatgcccggagaagtggcgttggtaacatttttgttaaggtatagttgcaatatcctcacaacacacaatcatatatctcctccatgtgtataactatatatatattattcataagtactaatttgttgtcttgtatgaaattcacagaaccttagtagttctgttgacaatgccagccttcaagaattgttctccaagtttggagacgttttgtcatgcaaagttgcaaaaaatgaggatgggaccagtagaggatatgggtttgttcaatttacatcacaggagtcagcagatgaagcaattgggaacctcaatggctcccttttcaatgacagaaaattgtatgttcatgccatttgtattaattataattatttataatatgttttacatatataattttctcgacaaactgtgcaggcatgtagctacgttcattaagaaaagtgaacgatctgcaaataatgatgataagtttactaacttatatatgaagcatctagatgatgacataacagaggaacttgttaaattgaagttctctcagtttggttcga

SEQ ID NO: 4767 - DNA, 432 bp, Zea mays
  misc_feature (377)..(377): n is a, c, g, or t
  misc_feature (386)..(386): n is a, c, g, or t
  misc_feature (411)..(413): n is a, c, g, or t
  misc_feature (421)..(422): n is a, c, g, or t
  misc_feature (424)..(424): n is a, c, g, or t
cgctactacatattcttgttcctccaatccatcgctttcttcatcgtcggcattggctatgtcggaacattcgtccctcactagctagctcgtagcagaatcattctgagaggctacccatcctgatgatgcatggttgtcttcaaccccttccggtttcatttcatggaaatcagttggtagataagatcgagcaaaccttctcttgtatgtaatgttgtcatgggaaaaaaaagaaaatacagtgtaaaggcacactggcagacaagccatagatatgagtaggtatgtgtgttgttgaaggaatgtgctgtgatgcgcatgggggattggtgatgacaagcaggccgttttgagtctccatgtcacctatgcangaatcaggntgggggggttctcagaatgattgtnnnaggaggcnncnagtggggg

SEQ ID NO: 4768 - DNA, 412 bp, Zea mays
aggtaataatcttggacatggtagttggatacgggcagccaaacataaagcatctagagacacaagttatgtttgatttgtatattatgacggttaatggagctgagcgcgacgagcaagagtggaagaagattttcatagaagcaggattcaaagactacaaaatcctaccaatccttggtgcactatcagtcatcgaggtctatccatgaatgcttgctgagcaaaggcctccacaataaattgaagaatctgaaagtgcgcgctgatagtaatctatgaattgttctttttactgtatacagtttgaagcacatcgtcgtgtgtccttccacatgtgatacgatatgtaaacgatgtgctatatatattacccatgctcccgttcgatgtagatgctggggatcataga

SEQ ID NO: 4769 - DNA, 384 bp, Zea mays
cgatctcgacgccggaagtatgaggaggacgaggactacgaggaggaggttgacgaagacgacgaggtggaggaggagtaccatgatgaccttgaggaggtcgaggaggaggaagaagtggcaccacagcggccgaagagcattgtgaaatgcggtgcccgtggccggaatgtgaagctgtctctggcagcgaagcgatctcatcagcggaagcaggaggatgatgaggatatggattttgacccagagttggatgacgaggaggtcgagatagatgaggatattgattttgatcccgatgtcgatggtgacgaggaggatgagtatcaagacgaggaggaagaggaactggttcctgcccgtgccagaaaggtaactgtaaag

SEQ ID NO: 4770 - DNA, 949 bp, Zea mays
  misc_feature (913)..(915): n is a, c, g, or t
aggtgggtgtgggttatatgcatcgtttggttgatataatcatggaattcattattatttcgatagtgttccattggattcatgtcatttgtaagcccaacgtccaaaagagtttgttcagtttctgaacaaaatttgcaataagattacatacaagtcaaacatagagaaatatttcctgtattttggtgtattaatgcataaccatgcacaccattagttctattcagaataggaagctgcgatgcaatcaactggcaacaattggaatctatgaggttaattttcatattgtgttatatgctttgtttgttaacggattcctttcataaaagactttaacgaggggctttgttatccttaaacgcaagcaagagagaaaaaaatcatccttgtctcacagaaagcgagctgtagctgtctggatacccttctcatgctattgcccttgaaattgttagccatttggaaatttgcacatcacgtactcatctctttttcttcaggtggagatgtggtcgttctatatgcctctatctacaaggatgtccccatggtggttaacctctctggccggtttcatttggagaaaggcattgaggagcgcctaggcaaagagtttatggatagaataaacaaggaaggctacatcgatgtcaaagacaaatcaggtatgggaacatgtctgacctacattgaacgctacgctacacaaaccatatcttctgcctgtgatttatttgcttttcatgtgcatctaataactgcttacctgttgcgatgtaggaaaggttttgtatagagtaaccaaggagagcttgatggaacggctgagccatgatatgcacgcaatgagcctttccatcagcaaagagtgcaggttatcagcttatttaggcataattttcccttnnngctaattaacaacaatcgagcgcccaattatagc

SEQ ID NO: 4771 - DNA, 546 bp, Zea mays
  misc_feature (412)..(414): n is a, c, g, or t
gatcgacctgcccttctcctgccgtgcggggtcctgctcctcctgcgccggcaaggtcgtctctggctccgtcgaccagtccgaccagagcttcctcaacgacaaccaggtcgccgacggttgggtgctcacctgcgctgcgtaccccacctccgacgtcgtcatcgagacgcacaaggaggatgacctcctataattctagctagctacacaccgccagggcccgtcgtcttgtgcaaccacatgcagtaccgcccgcgcaggagatcgatgagacgtgtcgtctcaataattctagctatatatatatatatgcatgcatgcatgcatgtatgtacttttctctgttccaaactgagtatattctaaattacaagatttaatcacaaggtttagagcaactccaaccatnnncgacaaactgtgcaggcatgtagctacgttcattaagaaaagtgaacgatctgcaaataatgatgataagtttactaacttatatatgaagcatctagatgatgacataacagaggaacttgttaaattgaa

SEQ ID NO: 4772 - DNA, 402 bp, Zea mays
taggcgcccagatttgaagccatggccacgacgacgaccaagtgatgacgacctagcagcgactcagcgagagcctaaataaatattaattcacagtcgtcaagttaatcttgtggttatacggtacgggcggggcttgtacttatgtaggttgctaagtcttaagtgtgtagtttaattaacgtgtgtgtggaatgtacgcgtcatacaaatgtgttggtgtgtgccctgccgcaagattgcggtgagcggtggatctatggtcaacgggtgcctaaatgatttgtgcttttgtagcataaaatggcacatctcctctgcttttgttacatctccaccttttctttttgcacttttcacctcaagtaaaacatgtggcggctttcactaagtacaaagaaa

SEQ ID NO: 4773 - DNA, 1416 bp, Zea mays
  misc_feature (779)..(789): n is a, c, g, or t
  misc_feature (792)..(806): n is a, c, g, or t
  misc_feature (808)..(836): n is a, c, g, or t
  misc_feature (838)..(845): n is a, c, g, or t
  misc_feature (847)..(854): n is a, c, g, or t
  misc_feature (857)..(864): n is a, c, g, or t
  misc_feature (873)..(874): n is a, c, g, or t
  misc_feature (878)..(881): n is a, c, g, or t
  misc_feature (885)..(887): n is a, c, g, or t
  misc_feature (891)..(899): n is a, c, g, or t
  misc_feature (901)..(905): n is a, c, g, or t
  misc_feature (907)..(912): n is a, c, g, or t
  misc_feature (916)..(920): n is a, c, g, or t
  misc_feature (922)..(926): n is a, c, g, or t
  misc_feature (930)..(930): n is a, c, g, or t
  misc_feature (939)..(946): n is a, c, g, or t
  misc_feature (950)..(952): n is a, c, g, or t
  misc_feature (960)..(963): n is a, c, g, or t
  misc_feature (965)..(967): n is a, c, g, or t
  misc_feature (969)..(972): n is a, c, g, or t
  misc_feature (975)..(979): n is a, c, g, or t
  misc_feature (981)..(991): n is a, c, g, or t
  misc_feature (994)..(996): n is a, c, g, or t
  misc_feature (998)..(998): n is a, c, g, or t
  misc_feature (1000)..(1000): n is a, c, g, or t
  misc_feature (1009)..(1013): n is a, c, g, or t
  misc_feature (1015)..(1028): n is a, c, g, or t
  misc_feature (1033)..(1048): n is a, c, g, or t
  misc_feature (1050)..(1059): n is a, c, g, or t
  misc_feature (1061)..(1068): n is a, c, g, or t
  misc_feature (1070)..(1070): n is a, c, g, or t
  misc_feature (1072)..(1072): n is a, c, g, or t
  misc_feature (1074)..(1076): n is a, c, g, or t
  misc_feature (1086)..(1088): n is a, c, g, or t
  misc_feature (1091)..(1098): n is a, c, g, or t
  misc_feature (1101)..(1105): n is a, c, g, or t
  misc_feature (1108)..(1116): n is a, c, g, or t
  misc_feature (1118)..(1120): n is a, c, g, or t
  misc_feature (1122)..(1122): n is a, c, g, or t
  misc_feature (1124)..(1131): n is a, c, g, or t
  misc_feature (1133)..(1148): n is a, c, g, or t
  misc_feature (1153)..(1163): n is a, c, g, or t
  misc_feature (1165)..(1167): n is a, c, g, or t
  misc_feature (1169)..(1171): n is a, c, g, or t
  misc_feature (1176)..(1179): n is a, c, g, or t
  misc_feature (1181)..(1193): n is a, c, g, or t
  misc_feature (1195)..(1196): n is a, c, g, or t
  misc_feature (1198)..(1200): n is a, c, g, or t
  misc_feature (1207)..(1212): n is a, c, g, or t
  misc_feature (1214)..(1214): n is a, c, g, or t
  misc_feature (1217)..(1227): n is a, c, g, or t
  misc_feature (1232)..(1240): n is a, c, g, or t
  misc_feature (1244)..(1251): n is a, c, g, or t
  misc_feature (1253)..(1257): n is a, c, g, or t
  misc_feature (1261)..(1264): n is a, c, g, or t
  misc_feature (1272)..(1280): n is a, c, g, or t
  misc_feature (1285)..(1288): n is a, c, g, or t
  misc_feature (1290)..(1290): n is a, c, g, or t
  misc_feature (1292)..(1297): n is a, c, g, or t
  misc_feature (1303)..(1307): n is a, c, g, or t
  misc_feature (1317)..(1320): n is a, c, g, or t
  misc_feature (1325)..(1329): n is a, c, g, or t
  misc_feature (1332)..(1344): n is a, c, g, or t
  misc_feature (1346)..(1348): n is a, c, g, or t
  misc_feature (1351)..(1351): n is a, c, g, or t
  misc_feature (1358)..(1358): n is a, c, g, or t
  misc_feature (1360)..(1371): n is a, c, g, or t
  misc_feature (1374)..(1378): n is a, c, g, or t
  misc_feature (1380)..(1392): n is a, c, g, or t
  misc_feature (1398)..(1407): n is a, c, g, or t
  misc_feature (1409)..(1409): n is a, c, g, or t
  misc_feature (1411)..(1411): n is a, c, g, or t
ctgcataatcaaaatccacaagctacgtttcatgccgcatggctatcttatctacactacagtctacaggcagactatttgtcaatgctaagatttcacgtccccatacagaaaaaagtgaaaacactgctatcacctgggagctctgggtatcacgagacgtacttgatcagccactcgaggctctgcattaaacagattgtgtaggagaataaaggagtgtttgaatgcactagagctaatagttggttggctaaaaaattgttagtactaatcttagccactaaatattaactctagcgcattcaaacacctcctaaatgtaaagttaacagccttgcaaactgtagcatgcatgaatcatgattcatgcccaccagtgtattcccaaaaaagaagagaaaaagaagagaatgtgtaccattaggcattctggtagatcatcatcctgcgtcctgatgtgagtctacaaatatgtaaagagctactcaataggcgtttccagtctagctagaatctgagcatgtaaatttggagtatggtatctgttttgatggaagttacagttcatactttgacttaggtatgcctaccaagttctgacaataacaaatgtaacaaaaattatagctagaaatggaggacctgggtgttcacctccgtcaccaaatggcatgaggactccttgtttgtggcaaggcaagcaagaactaccactgcagctgccacagtcgagggccagaaggagagctgctcatggttccgaagtgagatgaagnnnnnnnnnnnttnnnnnnnnnnnnnnncnnnnnnnnnnnnnnnnnnnnnnnnnnnnntnnnnnnnncnnnnnnnnacnnnnnnnnctctctcannctcnnnnatcnnntacnnnnnnnnntnnnnntnnnnnncccnnnnncnnnnnctcnctctccaannnnnnnncccnnnctcccatnnnnannncnnnnatnnnnncnnnnnnnnnnncannnantnccccctacnnnnntnnnnnnnnnnnnnncactnnnnnnnnnnnnnnnnannnnnnnnnntnnnnnnnncnancnnnccacttacannntcnnnnnnnnccnnnnncannnnnnnnncnnncncnnnnnnnncnnnnnnnnnnnnnnnnccccnnnnnnnnnnncnnncnnnccctnnnncnnnnnnnnnnnnntnncnnncctcccnnnnnncntcnnnnnnnnnnncatcnnnnnnnnncccnnnnnnnnannnnnttcnnnnactcccannnnnnnnnattannnntncnnnnnnatttcnnnnnctttatacannnnaaaannnnnaannnnnnnnnnnnnannnctntactccntnnnnnnnnnnnnccnnnnncnnnnnnnnnnnnnacatcnnnnnnnnnncnanccata

SEQ ID NO: 4774 - DNA, 378 bp, Zea mays
gccggtacgtggcgtcgtggcatttgccaccattgttcccagcaagcacacacgcgccgtacctactcactctgcagtgaaaggagagaggaaaagggacggtgatgtacaggctctctctctcctccctgtctggcacacaaaggacaagaacacagaacgcaaccaaggctactccatgtctccatctccatgaccatgagagaggtgcaaacatcaccgcagcactgttccttctactacagcaacagttaggctggccctcttcggctcctccccaataaatcgtcctctggctcaacctctccttttacagaattacagactgccaggggcataaagaactcttgagtctataccactcaaggcccagacaaa

SEQ ID NO: 4775 - DNA, 366 bp, Zea mays
atccccacactgtgactggctgatcatatccacacaccacacaaggacgcctccaaacctgtttgttgtgtttcatcatcaatttctactctcctttccacaatacaaatgccatccacggccatagttggtttcgaattacatgcatacatacattacacacggcctcactcatcaaaacaaaacaataaaataaataaacaaataaataaatagtttcaagaactgcagctacgtctatgtgcgtggccacctttgcacgacactgacccggtcacaaacgcacgcacgcactctgcgtgcgctctgctggcggctgctgccctgcccactcaaaattgtgctgctatatgttggcaaggtcta

SEQ ID NO: 4776 - DNA, 406 bp, Zea mays
  misc_feature (395)..(397): n is a, c, g, or t
ctagagaaaagtgatagagtatctggggatttgagaattaaatcatgtcgatggttcggcagtatagaggacctgtaatcatcaggaagcccaagttcccttcttatgagccataacgcgtgcatgttcagagttccatccacagagagcatgagaagtttcttcagccgctgaactacgccgacctcattctccctgaccacagcgtcttcctctgcgatcaagtcggacatcttctgcgtgaccttgcagcagtggttcctcttgacagggtgcacgtaggtctgaaacacgtgggggtatttcttgaggaaagcaccgacctcaatgttcagcccgacctcatgcctccaccttgagaggagctggagagacgcgtatccgttcctctgctnnnatatcacaa

SEQ ID NO: 4777 - DNA, 622 bp, Zea mays
  misc_feature (397)..(404): n is a, c, g, or t
  misc_feature (407)..(409): n is a, c, g, or t
  misc_feature (431)..(433): n is a, c, g, or t
  misc_feature (576)..(576): n is a, c, g, or t
  misc_feature (595)..(595): n is a, c, g, or t
  misc_feature (597)..(600): n is a, c, g, or t
aagcggtgtggagctgttgttgcctgcttagctcgaagagtaacaccagctggaacctctactagcgttgggacatcgaaagtgaccccctttccacccgtggtgagtgatcaagttggtacagagggcgctcctcgacttcaacgcagccgtgctgtgtccagggaccttgttagagattggaacttcgacgaagtaatcgtcgcaaattagagtagctctcaacagtcgtcagctggactctgtgctctacttatcagggaggagattccttcattcgatgtaaaattttcatagtagacgtctggaagtccatgttactatatgtcaatacttgatcacttgatgaggaaatgctcgagagggatggtacctttcaggagcaatattttggacnnnnnnnngtnnnatccctctcgagcatttctcannngtgatcaagtattgacatggacttcagacgtctactatgaaaattttaatcgaatgaaggaatctctcctgataagtagagcaagagtcagctgagactgttgagggctactctaatttgcacgattacttctcaagttcagntctaacaggtcctggacangnnnngtgcgttgaagtcgaggagcgc

SEQ ID NO: 4778 - DNA, 535 bp, Zea mays
cggcggcgctggccggcgacgccaggaaagggagcggcggcggccgagggagtccgtccagcttgtacttccccaatggcttcgcatgagtatttaatctccttcatcaagcaagagcaatgcattttcgtttctctctacatatatccatccaaagatgatccttttctctacctcgcgctagctctttcaacactctccgttggattggatctttaatttgcattgtgatgtgaggacgatggtcgtgtagctagctatagcttgctactgttcaacgagctaggagagagagagagagagatgagctagcagtagtagcactgcaaggatttcatgatattttatgtggattaattgttcgatgcacatcacaatgcaaattaaagatccaatccaacggagagtgttgaaagagctagcgcgaggtagagaaaaggatcatctttggatggatatatgtagagagaaacgaaaaggcattgctcttgcttgatgaaggagattaaatactcgtgcgaagccgttggggaag

SEQ ID NO: 4779 - DNA, 404 bp, Zea mays
  misc_feature (372)..(373): n is a, c, g, or t
  misc_feature (397)..(398): n is a, c, g, or t
ctacaatacccttgttgatgcatgcttcaagtgtcagcgctcttctgatgcactgaatctgctcgaggaaatgcgtgagaaaggggtgaagtcaagtttggtcacacataacattattgtgaagggcctttgcagggaggggcaattggaagaggcgttggggcgtctggaaatgatgacagaggagggattgacaccggatgtgattacatacaatacattgattgatgcatcctgcaaagccggaaatgttgccaaagcatttgtgttgatggatgagatggtgagaagtggactcaaaatggacactttcaccctaaacactttgctatataacctatgcaaagagaaacgttacgaagaggctgaaanntgttgaatgcatgcatcagggtgnngttggt

SEQ ID NO: 4780 - DNA, 369 bp, Zea mays
ccttcctctgctgtatccaggaatcctgtctccggaggttcgggttttcttttgtcatcaaatactatttcatatgactgatcgctttcgctggcagtttctttccggtcgtcagaactgtgctcaagtgaatgatcaaccataccaacaaattcctgctccgatggctccggacttctcttggctgggccagcagcttgatccgatggtacggcggctaattgtctcgcagagactgcctctggacttctttgcgcatcagaagcagcttcacctcccgagtgatcatttagagcgatgatctccttctccgaatgatccatacagttgtcagcaacaggagctagatcatagactggcgcagattct

SEQ ID NO: 4781 - DNA, 434 bp, Zea mays
caaggatgtcaatgtagtggtctggcgggttgacacggtcggggacatggatcccgagagtcgtcgtgaagtactcctcgaccgtctttacggggccgttgtagaccaccaagcctcctttcgcgagcagcatcagatcgtcgaacatgttgtacaacgtgtagctgggttggtggacgacagcacagacattgacgccttccagcgcctcgtgccggagagctctgaggaggagctgcgacgaggagctgtccaggccagacgttggctcgtccaggattagaagggatggctccatcaccatctcgatgcccacgttgacgcgcttcctctgcccgccagaaatcccgcgcttttccacggttcccaccaacgagctcctggtcccctgaaggtccagagagtcgattactctctccactaccagcaccttg

SEQ ID NO: 4782 - DNA, 1224 bp, Zea mays
  misc_feature (675)..(675): n is a, c, g, or t
  misc_feature (703)..(704): n is a, c, g, or t
  misc_feature (706)..(706): n is a, c, g, or t
  misc_feature (708)..(708): n is a, c, g, or t
  misc_feature (716)..(717): n is a, c, g, or t
  misc_feature (719)..(727): n is a, c, g, or t
  misc_feature (733)..(733): n is a, c, g, or t
  misc_feature (736)..(737): n is a, c, g, or t
  misc_feature (740)..(740): n is a, c, g, or t
  misc_feature (742)..(742): n is a, c, g, or t
  misc_feature (744)..(745): n is a, c, g, or t
  misc_feature (748)..(750): n is a, c, g, or t
  misc_feature (753)..(755): n is a, c, g, or t
  misc_feature (775)..(784): n is a, c, g, or t
  misc_feature (786)..(790): n is a, c, g, or t
  misc_feature (793)..(799): n is a, c, g, or t
  misc_feature (804)..(804): n is a, c, g, or t
  misc_feature (811)..(811): n is a, c, g, or t
  misc_feature (814)..(816): n is a, c, g, or t
  misc_feature (818)..(819): n is a, c, g, or t
  misc_feature (821)..(822): n is a, c, g, or t
  misc_feature (824)..(830): n is a, c, g, or t
  misc_feature (832)..(832): n is a, c, g, or t
  misc_feature (834)..(835): n is a, c, g, or t
  misc_feature (837)..(837): n is a, c, g, or t
  misc_feature (839)..(840): n is a, c, g, or t
  misc_feature (842)..(842): n is a, c, g, or t
  misc_feature (845)..(845): n is a, c, g, or t
  misc_feature (848)..(851): n is a, c, g, or t
  misc_feature (854)..(865): n is a, c, g, or t
  misc_feature (868)..(872): n is a, c, g, or t
  misc_feature (875)..(882): n is a, c, g, or t
  misc_feature (884)..(891): n is a, c, g, or t
  misc_feature (895)..(923): n is a, c, g, or t
  misc_feature (925)..(928): n is a, c, g, or t
  misc_feature (931)..(933): n is a, c, g, or t
  misc_feature (935)..(940): n is a, c, g, or t
  misc_feature (942)..(942): n is a, c, g, or t
  misc_feature (945)..(948): n is a, c, g, or t
  misc_feature (950)..(950): n is a, c, g, or t
  misc_feature (952)..(952): n is a, c, g, or t
  misc_feature (959)..(968): n is a, c, g, or t
  misc_feature (976)..(982): n is a, c, g, or t
  misc_feature (988)..(993): n is a, c, g, or t
  misc_feature (995)..(999): n is a, c, g, or t
  misc_feature (1002)..(1004): n is a, c, g, or t
  misc_feature (1006)..(1008): n is a, c, g, or t
  misc_feature (1016)..(1016): n is a, c, g, or t
  misc_feature (1019)..(1019): n is a, c, g, or t
  misc_feature (1021)..(1021): n is a, c, g, or t
  misc_feature (1025)..(1028): n is a, c, g, or t
  misc_feature (1032)..(1044): n is a, c, g, or t
  misc_feature (1052)..(1055): n is a, c, g, or t
  misc_feature (1059)..(1061): n is a, c, g, or t
  misc_feature (1063)..(1063): n is a, c, g, or t
  misc_feature (1068)..(1073): n is a, c, g, or t
  misc_feature (1075)..(1082): n is a, c, g, or t
  misc_feature (1087)..(1091): n is a, c, g, or t
  misc_feature (1096)..(1096): n is a, c, g, or t
  misc_feature (1098)..(1101): n is a, c, g, or t
  misc_feature (1104)..(1108): n is a, c, g, or t
  misc_feature (1111)..(1111): n is a, c, g, or t
  misc_feature (1113)..(1115): n is a, c, g, or t
  misc_feature (1121)..(1121): n is a, c, g, or t
  misc_feature (1124)..(1128): n is a, c, g, or t
  misc_feature (1130)..(1134): n is a, c, g, or t
  misc_feature (1137)..(1142): n is a, c, g, or t
  misc_feature (1147)..(1152): n is a, c, g, or t
  misc_feature (1154)..(1165): n is a, c, g, or t
  misc_feature (1174)..(1174): n is a, c, g, or t
  misc_feature (1177)..(1178): n is a, c, g, or t
  misc_feature (1180)..(1182): n is a, c, g, or t
  misc_feature (1184)..(1185): n is a, c, g, or t
  misc_feature (1196)..(1205): n is a, c, g, or t
  misc_feature (1207)..(1218): n is a, c, g, or t
agctaaagaatggtggatggggtgagagtcatctttcttctacaaccaaggtaaccatttccggtatgcttttgcaacgtagatggactgcatctttcatcaagaaccaagctaaagaatgttttacagtaagcaacacatccagacaatggaagcatgctttgatcctgtttctgtttaaattatagacaaaaagtacagaaatctgcatgaattcgtaaccagatagtaattcattaggaacatgaagcattgagaggaaacaagtaacctggctcagccttatttagagaaagtgaaacaagcaataaagtaaataaactttacgttggaaaaaaaaaccgttgcaattgcatggcaagaagagcatgagtcatactcatacataatatgtttcaataattccatatgtacctcaataatggaacatgcaggctgaatatttgctggttggaaaacattatgcatcttttgctttcacaaagtttacagtgcacctgtattaatgctgaagatttttgtctcaaaatctgtcttgccttgccgcattttcaatccatgagactgagcacatattcaaattatgaacaggcatacacaaatctggataaggagaagtcacacatagtgaacactgcgtgggcaatgttggcgctcatgaaagctggacaggtnattacttgatttaacactaaaaaatatnnancngccaattnnannnnnnnnnatttancannaanananncannnaannngcttatctatttaaccttannnnnnnnnnannnnnatnnnnnnnttttntctaagntcnnngnngnnannnnnnncncnncncnntnccnaannnngcnnnnnnnnnnnntgnnnnnttnnnnnnnncnnnnnnnnaatnnnnnnnnnnnnnnnnnnnnnnnnnnnnnannnnggnnncnnnnnnanaannnnancntttttannnnnnnnnnttcccctnnnnnnnaaaaannnnnnannnnnaannnannnaaaaaaanagntncccnnnnaaannnnnnnnnnnnnctttttcnnnnaaannnanaaaannnnnntnnnnnnnnccaannnnnccccncnnnnaannnnnaanannnaaaaanaannnnncnnnnnggnnnnnngggcnnnnnnannnnnnnnnnnntgttccccncannannntnntaaaaaaaaannnnnnnnnnannnnnnnnnnnncttttt

SEQ ID NO: 4783 - DNA, 486 bp, Zea mays
gcaggctctccaagagttctcaggcaatgaggtctctggtacccaggtgtacaaccacttgaggaagtggaggcagaggtgggttaggatcactaagcttagagagctcagtggtgcactttgggatgaagataatttcatgatcacacttgaggatgagcactacaggggccatgtcaaggtatgccacattgactttaggtagtagtcaatgttatatctattttgctttcaatgcctgcattattttgttgtcagtgctgacttatgtattctaactatgcagacacaccctaaggatgctgacttcctaaacaaactaattgagaactaccagcagatgcagatcatctttggcaatggtctagcaacaggcaaatttgccatgggttcaaatgaggctcttggttcaccatctgactttgttgagggcgcactgctgggtgagggacacaagagtggactgaagacagaggatgtgtccaa

SEQ ID NO: 4784 - DNA, 367 bp, Zea mays
tggcttccttccgcgttcagcaccaacgcacatgctcttcaccgctgtccatgcatccttgacggtgttcttcgcgccaagcatctgccacatttccgggggcacagaccggagcagagcgctcatggcctccggtcttgccaccgcttcactccttcgccaccgggctcgatcgtctcccagatctccagagcctcgaaattgcattgcatgagcatcgcccactccgtataattggagcgggttagcattggccacatgagagaaccctcccgcacgccatgccctgaactgctcggctgttcggcgtcacctgccatcttcttcgtctccggtgaccagcgcgggggaggcgcttctttcttgg

SEQ ID NO: 4785 - DNA, 361 bp, Zea mays
gtcaggtcatctgctcccgtcacttccgcctgggaggacacacctggttcgtgaagtattaccccaatgggaacgccgccgacaacgtcaacttcatatcgttgtttctcactatgcatggtgcagtagccggcaaggcagtgaaggcgcaggtcaccatcagtttactcgaccaggacgggaagccggtgccgtcgtacaccaaagtcacaccattcgtggacttcgctgcgaaaggggactggggatacacagagttcatcgagaggaaagctctggaggaatccgagcatctcagggatgactccttcaccgtcaggtttgatgtgaccatcatgagcgacatccaaaccggtagaaa

SEQ ID NO: 4786 - DNA, 365 bp, Zea mays
tctctgtgcagtcccaagtggagtgcggggtcagggggtggtggtcgccgttagcggaagggtggcctcgtgtgtgggcgtggccagggcgacactccttcgccctctccctacaacccgtggaccggccacatctccatgtggcccggactatccccgggtggacctccacacccaccttggccctagcctgctcaattgacgctgcccaacccgagttatccttttggcccctttcccccgctcctctggcacctcatccaccgcaccactacttcccttgcctccactcgttccgtcctggaacccgtggtctggtggatgggatcgcagtctctggccaactccttcagtataatgaccca

SEQ ID NO: 4787 - DNA, 872 bp, Zea mays
aatggcggccagagggttacatttgccaggccagacggctactttgcattgtatcctacaaaagatgcattgccataagttcaattttattctgattttttcctggaaacttcatctattaaaatgatatagctcgtactatcatacctttttctgtttgttggtaaaattgatggcgagggatgggtatgtactaagcaaagaaactgtagttctcatcatgcgcataccattaattcttgcctgctcttgggtatatatttcattgtatacaattataggtcagtgttaggagatcactatatttgctttattgttggctccttgacctgatatactttagccacaacgtgccagctggaactcatctgattgaggtctcctcaattggttacttcttttccccagtaagtatttattccttgattttgtaagtatggtgaagggaaatgaatataggtaatttactccatatttcttgtaaatgataggtttgagtagatatcagtgcatggaatcttggttatattcaagcagcattgactgaaactagaagagttctaaatgagcttgtcctggaacctctaaaagaagagcagtactatgaggtaggtattgctaaatattttttgtatacttgtttcctcggagttctcacttctcactgctgactgattataaaatggttctatgcagataacccttttcatttattgattgtgggatgttttagttatcgttaaatgctgaaattacaattgcacttcaattacgtagtttttcttcagcatttgaaatgctaatactgattttgtttctatatatgcctaactaaatttactcttgtgatgaagatcctgaggagatgaagc

SEQ ID NO: 4788 - DNA, 413 bp, Zea mays
ccgatcatttctagaccgaggaggcgctcgactcggtgcaccgcctgctctggtggggctcgcctgcgttcaccgggaggatctgggcagcactactcccctcggtgatcttgctgccggggagtttgtgctctttgtctcctatctcttctgtggattggcattgccgatttcaccgttcttcctgctgctgctagaggagttcggactccaactccagcacctcacgccccactccatcctccaggtggccatctttgtccatttctatgagatgttcgtgggagtggtagcttgcacttccctttttcgccagttctttgtgctggtgaggtctaggaagggcaaagaccaccttggggcctactacttccagacaaggtcagatccaacagtgacctatattgtctccc

SEQ ID NO: 4789 - DNA, 403 bp, Zea mays
gaaagtatgattgcagacggtggtcaaaagagttttctgttttggctagaatgccttgcaaaactgaggaagaacgggtgatcagagaccggaaagcttttcttttacacaatctgtttgtagatacagcaatttttagagctgcgtcaacaataaggcgactcattgatcagtctatgaactcagttggttcacatagtggtacacatggttcaaacgtatttgaggaacgtataggggacatgaatataactgtgaagaaggatggtgctgatgctagtttaaaggtggaggacaaggttgatggtgttgccttctgtcaaacgggtgctatggatattgcacaaaggaatcttctgaaaggtttaacctctgatgaaaatgttgttgctaaggagatgcc

SEQ ID NO: 4790 - DNA, 511 bp, Zea mays
cgacctcgtcgccctccaaggtaacgaccgtcgactttgttatcaataataatctgaaacatatcagaaaataatctctctttgttacatatatactaactatatatgggttacacatactgacgatttcaacaaatttccctatttcaattcaggagcacacacttttggtaaagtacagtgtcaattcacacaagagaactgcacagctgggcagccagaggaaacactagaaaacctagaccaggtcacccccaacgtgtttgacaacaagtattacggtaacctcctgcatggcgccgcacagctaccgtccgaccaggtcatgctgtcggcggaccctgtcgcggagatgacgaccgctcccattgttcatcggtttgcaggcaaccaagaagacttctttagaaactttgccgcatctatggttaagatgggcaacataagcccgctaactaggaacgatggagagatacggaaattttgccgaaggattaatagcgaaggctat

SEQ ID NO: 4791 - DNA, 389 bp, Zea mays
  misc_feature (376)..(377): n is a, c, g, or t
  misc_feature (379)..(379): n is a, c, g, or t
actgacagagaagagtgacgtctacagcttcggtgttgtccttcttgagatcctcaccggccaagagcctctcaagttggatgggcctgagacgcaaagaagcttgtcgtcgaagttcttgtccgctatgaaggagaacaatcttgatgcgatcttgccgagccacgtcaacggacaagggagtgatgaactgatcagagggctcgcagagctagccaagcagtgcctggacatgtgtggcagcaacagaccgtccatgaaggaggtcgccgatgagcttggtaggttgaggaagctttcgctgcatccttgggtacagatcgatgcagacatgatagagactcaaagccttcttagtggaacaacggctgctagnntngaaatagaag

SEQ ID NO: 4792 - DNA, 648 bp, Zea mays
  misc_feature (420)..(426): n is a, c, g, or t
  misc_feature (435)..(442): n is a, c, g, or t
  misc_feature (450)..(452): n is a, c, g, or t
  misc_feature (454)..(456): n is a, c, g, or t
  misc_feature (458)..(458): n is a, c, g, or t
  misc_feature (460)..(464): n is a, c, g, or t
  misc_feature (487)..(487): n is a, c, g, or t
  misc_feature (511)..(511): n is a, c, g, or t
  misc_feature (515)..(518): n is a, c, g, or t
  misc_feature (522)..(627): n is a, c, g, or t
  misc_feature (629)..(645): n is a, c, g, or t
cgtcgcgctcgtggcggcgccgtccctccgggtggtggaactcaaggagggccgccgcaggaggaccgaagcgccgttcctcgccatgttcgtgatcaccctggccaccggagcctgcgccgtcgtcggcagcgtaggggccaagtccatcgggctctcgtctagagcacacatggtcagcctctacgtgctgctcgccctgcctctgctgatcccagtgtggctcagagtcagggagggcacggccaagatacgcgagagtatgtgggagaaccgggtccacgatcacgactccgacgggcccgagtccgagacggcggtacccgcgccggtgtcggtggtcgagattcaggcggaggacaagcaggaggaggcaggggcggagctccaacgacagaataatggtcaacaaaaaaatgnnnnnnngttgttctnnnnnnnngatcccannncnnntntnnnnnatattcaagcctcagggaggccnacagcacattagagatggaacgtntaannnnggannnnnnnnnnnnnnnnnnnnnnnnnnnnnnnnnnnnnnnnnnnnnnnnnnnnnnnnnnnnnnnnnnnnnnnnnnnnnnnnnnnnnnnnnnnnnnnnnnnnnnnnnncnnnnnnnnnnnnnnnnncca

SEQ ID NO: 4793 - DNA, 412 bp, Zea mays
ccaaattgaaaagacaaatggtctccaagagagacacttgacaacacttacatgtgctccccgatcaatgccgcccatcgccataatgtaaaatagattcaaccactaagacactcacctgtcatcggagcaacctctgttgccctggattacaatgacatcgtcatcaggagaggccttgtccagttgcttgcctctaaagtggaagaatgcaaaggagaggagcctgggagtgacagagcaggtgaaccagagactccaggtctcgaggccgggcgacacccagatgaagcggaggcgggtgcggaggtcaaggaagagcagccccgttcagcgcgggtgccaggactagtcgacgacgaggccgatcatgatagtggcctagatcgacaccacacagagtagcacgtcg

SEQ ID NO: 4794 - DNA, 768 bp, Zea mays
tattaccaggcaatttcatgctctattttatttgttaatgtattacatagcagtccttttattttttttggttcgtacaacaacatacagaccatcatagctaggttgtattttgtataggcctggatctactggaatcttccatccacccggtttcagaacctccacggtatagcaggcagtatacaggccgcaagatgcacaagtcccagtcttgtaagtagttggtcacatttctgatctctgaacttgcgaaaagattactttgatactgatctgaactcgttgcagccatttctactccagttcgtcggcagtctacgatgaggtaaacagatagtaactctcagatccctcttcacttttgtttgagtttgagggtcaaagccaatgtccaatggccaaagagatacactaacactagtgctggtatgcccggccgatctgctctgttgcaggcgtgaaccatctcctacacctaacgatcggtcgcggtcgttatcgccttctcgtaaagcacgagctaaatctccatctcctcgaatcgtgaacacaaatactgcaagaggtacgctgttctttctctgaccgagcagatgtttgagatgtgaagcttgcatagaaaggacattcattatcgccttcccctttttgctacacagaaacaagggcaggctccccgataccaagttccagcccgatggcacggtccgcctctacggttgcaagaagaccgccttcgaactcgaggcatttgagactagctcg

SEQ ID NO: 4795 - DNA, 416 bp, Zea mays
actcatgtgcttcgctgacaattctgaaggtgtcgagcaacaacatcacgggacccatcccggcgtctctgtcggcgtgccatgcgctgcggatgttcgacgctgcggacaacaagctgtccggtgccataccggccgccgtgctcggcaacctgacatcgctggagagcctgctgctaagcaacaacttcatctcgggctccctcccgagcacgatcacctcctgcaccagcctcaggatcgccgacctcagcagcaacaagatctccggcgtgctgccggcggacctctgctcggctggcgccgcgcttgaggagctccggatgccggacaacatggtcaccggcatcatcccaccgggtctttccaactgctcgcgcctgagggtgatcgacttcagcatcaactacctgaaa

SEQ ID NO: 4796 - DNA, 560 bp, Zea mays
tgattgggctaaaagtctgccggcgggtagcaacgataatgcacttgagaactctgatggttagtgaaaatgcttttctttctagtcaaagtcgtcaaccactgtagtgaaaaatgctttgtttcttatcccatccaacaacaacccacaggtgcaggagcaggagctcgtctggccaaggtgaacacagatgccgtttttgacggttcatctgagaccgtagttctgtaccctgaaaatggagggaacttgcactgctttacggcgctgaccccttgtgccgtgctggatgtgatgggccctccctacaaccgtgctcaaggaagggattgcgcgtattacagcgaatcgccctactcgtgtggtgagtttcttcttctgccaccggccaccagtgtttccttaacgctaggctgaggaataataatatgttgttatatgtgggggtttcagctggagatgcacaatattcttggctcaaagaggttcacagcacatttgagatggaaggcataaagatggagcccaacttcatcgtctaataattaagcaggcatggc

SEQ ID NO: 4797 - DNA, 439 bp, Zea mays
  misc_feature (405)..(408): n is a, c, g, or t
cggttcgaggagctcaacatggacctcttccgcaagtgcatggagcccgtggagaagtgcctccgcgacgccaagatggacaagagcagcgtgcacgacgtcgttctcgtgggcggctccactcgcatcccccgcgtgcagcagctgctccaggacttcttcaacggcaaggagctgtgcaagagcatcaacccagacgaggctgtcgcgtacggagcggccgtccaggccgccatcctcactggcgagggcaatgagaaggttcaggatctgctcctgctcgacgtctcgccgctctcgctcggcctggagacggccggaggcgtcatgactgtgctcatccccaggaacaccaccatcccgacaaagaaggagcaggtcttctccacgggttttgtgcttgtnnnngaggtccatgttgagctcctcgaacgggggg

SEQ ID NO: 4798 - DNA, 972 bp, Zea mays
acctgtgagttttaacgcctggatctatcccttcagattgaattgacagtttagtacatatttgcaaagaggtagataacgtcaagaccagtcgatttaaccatccttttcttgacacttacaggatcaggaaatggtcttctttttggcaatcactgaaaatactgacgtgatgaggagcagattgcatccctatggttgtattgtaatatatctacatcaacatggcaatacgtgtctggacatggatgctacagttacatgtaaatgcagagttgcacaggtagatggcaaccttttctcccctgagatgccaactctgactcctactgtatgtactaatcttaacgacagtatccaatcagtagtcagttccttaggatgtcataaggtactgtgcaaacatttttctcctctgaatactgttatactaaatcaatgagatgtttgcagtttgtttgtttgttttaaagttaaaaaaaggagcgttgaagtgtttgttgtcaactgaccaaaatacaaccaactggtcctgtctacagacggagattggagaacatgcatgcctatgcatcggaagtgtatatgcacatcatatatcaatcactcttgtctttctgcctgctcctttttccggggaccaacactcccaacattgagcttatctacttcccgtactagacaaaatgtaattgtaggttttagcaattatagataaaaaacaatgtttatgataccaaataaacactattaaattaatttagaactatagataccattttttttactgtcataaatacaataccatttattagaaacttaatcaaacatgagtcactctaacgagctgcatttttctaaggacagaggaagtatatatgttgctaacacccatagcttgtggaaaggtttggtcgacaggagcatgcatcttcacacgacgtggacagtggactacgggccgaggcagtg

SEQ ID NO: 4799 - DNA, 320 bp, Zea mays
atgaaaaacaaaaaaaaaggctaaaagaaagtctacatgtcgtatctagctgatgaggaaaaaaatgaagagcacaaaaggaatacactgcaacttgttcaggatgacattgcattactgaagacagatctcggcacgaaatctttggcgcaacttgttcaggatggcatcaaccagcagctttacccgggcacctggtaaggacagggagttgaaatttggaactaacatgccgctggagacgtgcttcaaccttctgccttgccgggagaaaccacctctaggagcaaggcataacgtagctcgcaggaaactataaa

SEQ ID NO: 4800 - DNA, 480 bp, Zea mays
gcggtggcgctcctggcgctgtcgtcgtgtggcgtggttgcctcggcggcggcgtggaggggcaagcctcagaagttgaagcccggggagaagccctccggcaaatccaagttcttcgccctcacccccggaatgttcggccacaagcgcgactaccaggccgcctgctccgacgagggtggcccggcatgctacgtgggttgcccaaaggattgccctaacaaatgcctcgtcttctgcgcctactgcctcagcttctgcagtatgttgttcattaatgtgtctcaacatgcatcatgcattatggatcacatctatatatcgatcagtatatatactaacgaacatgcgcatacccaaaccaaaccacaaccccggccgaccggccagtgtgtgatatcttccccggcacctcctgcggcgacccgcgcttcaccggcggcgacggcaacaccttctacttccatggaaacaaggaca

SEQ ID NO: 4801 - DNA, 727 bp, Zea mays
  misc_feature (368)..(368): n is a, c, g, or t
  misc_feature (375)..(379): n is a, c, g, or t
  misc_feature (387)..(389): n is a, c, g, or t
  misc_feature (393)..(393): n is a, c, g, or t
  misc_feature (412)..(421): n is a, c, g, or t
  misc_feature (423)..(427): n is a, c, g, or t
  misc_feature (432)..(436): n is a, c, g, or t
  misc_feature (438)..(440): n is a, c, g, or t
  misc_feature (442)..(442): n is a, c, g, or t
  misc_feature (444)..(447): n is a, c, g, or t
  misc_feature (449)..(451): n is a, c, g, or t
  misc_feature (453)..(459): n is a, c, g, or t
  misc_feature (462)..(476): n is a, c, g, or t
  misc_feature (480)..(480): n is a, c, g, or t
  misc_feature (483)..(486): n is a, c, g, or t
  misc_feature (488)..(492): n is a, c, g, or t
  misc_feature (497)..(515): n is a, c, g, or t
  misc_feature (518)..(528): n is a, c, g, or t
  misc_feature (530)..(530): n is a, c, g, or t
  misc_feature (533)..(539): n is a, c, g, or t
  misc_feature (541)..(555): n is a, c, g, or t
  misc_feature (557)..(594): n is a, c, g, or t
  misc_feature (597)..(608): n is a, c, g, or t
  misc_feature (614)..(617): n is a, c, g, or t
  misc_feature (620)..(629): n is a, c, g, or t
  misc_feature (631)..(639): n is a, c, g, or t
  misc_feature (646)..(651): n is a, c, g, or t
  misc_feature (653)..(656): n is a, c, g, or t
  misc_feature (659)..(665): n is a, c, g, or t
  misc_feature (670)..(670): n is a, c, g, or t
  misc_feature (674)..(679): n is a, c, g, or t
  misc_feature (682)..(692): n is a, c, g, or t
  misc_feature (694)..(698): n is a, c, g, or t
  misc_feature (702)..(709): n is a, c, g, or t
  misc_feature (713)..(719): n is a, c, g, or t
gagctgtcacctcgttcttccctgctcaacctcgtcaaaccccgaatcccggatgttaggcaaaaataagcgaggttcatgtgcatcgcttatcaaatgctcggtcgaagacttcaatcgaaggtcgtcgtcgttccgtgcgtcatcaagaaatcccaagaatcgggtgaagacgaagctagcagcacgatattccccaagcgctcgacaaattgcctggatcggaaaatcattaccgatcccgcggattcgagacagatattggagcagtgagctgttttgctatttttactgactagtttgataaatgaattggtaggtatgtatgtcgcgatgattatttcacttgtagctcacgaacgcaaaangggcgcnnnnngcgcactnnncccnactattttttgggactatnnnnnnnnnnannnnnctgannnnngnnngngnnnngnnntnnnnnnnatnnnnnnnnnnnnnnnacgnagnnnncnnnnntgatnnnnnnnnnnnnnnnnnnnacnnnnnnnnnnnantcnnnnnnncnnnnnnnnnnnnnnncnnnnnnnnnnnnnnnnnnnnnnnnnnnnnnnnnnnnnntcnnnnnnnnnnnntccatnnnngtnnnnnnnnnntnnnnnnnnntctttcnnnnnntnnnnttnnnnnnntttancatnnnnnnaannnnnnnnnnngnnnnncctnnnnnnnntacnnnnnnnttgagtag

SEQ ID NO: 4802 - DNA, 1348 bp, Zea mays
  misc_feature (62)..(63): n is a, c, g, or t
  misc_feature (356)..(357): n is a, c, g, or t
  misc_feature (359)..(359): n is a, c, g, or t
  misc_feature (361)..(361): n is a, c, g, or t
  misc_feature (478)..(480): n is a, c, g, or t
  misc_feature (573)..(581): n is a, c, g, or t
  misc_feature (584)..(587): n is a, c, g, or t
  misc_feature (589)..(606): n is a, c, g, or t
  misc_feature (609)..(624): n is a, c, g, or t
  misc_feature (627)..(634): n is a, c, g, or t
  misc_feature (639)..(642): n is a, c, g, or t
  misc_feature (644)..(645): n is a, c, g, or t
  misc_feature (647)..(649): n is a, c, g, or t
  misc_feature (654)..(663): n is a, c, g, or t
  misc_feature (665)..(669): n is a, c, g, or t
  misc_feature (673)..(696): n is a, c, g, or t
  misc_feature (698)..(711): n is a, c, g, or t
  misc_feature (713)..(716): n is a, c, g, or t
  misc_feature (720)..(720): n is a, c, g, or t
  misc_feature (722)..(728): n is a, c, g, or t
  misc_feature (730)..(737): n is a, c, g, or t
  misc_feature (741)..(758): n is a, c, g, or t
  misc_feature (760)..(769): n is a, c, g, or t
  misc_feature (771)..(785): n is a, c, g, or t
  misc_feature (787)..(787): n is a, c, g, or t
  misc_feature (790)..(791): n is a, c, g, or t
  misc_feature (793)..(798): n is a, c, g, or t
  misc_feature (801)..(805): n is a, c, g, or t
  misc_feature (809)..(810): n is a, c, g, or t
  misc_feature (814)..(815): n is a, c, g, or t
  misc_feature (818)..(821): n is a, c, g, or t
  misc_feature (824)..(832): n is a, c, g, or t
  misc_feature (836)..(841): n is a, c, g, or t
  misc_feature (844)..(844): n is a, c, g, or t
  misc_feature (847)..(855): n is a, c, g, or t
  misc_feature (858)..(871): n is a, c, g, or t
  misc_feature (877)..(882): n is a, c, g, or t
  misc_feature (885)..(889): n is a, c, g, or t
  misc_feature (896)..(896): n is a, c, g, or t
  misc_feature (898)..(902): n is a, c, g, or t
  misc_feature (904)..(925): n is a, c, g, or t
  misc_feature (929)..(929): n is a, c, g, or t
  misc_feature (931)..(934): n is a, c, g, or t
  misc_feature (942)..(943): n is a, c, g, or t
  misc_feature (945)..(945): n is a, c, g, or t
  misc_feature (947)..(955): n is a, c, g, or t
  misc_feature (957)..(959): n is a, c, g, or t
  misc_feature (965)..(967): n is a, c, g, or t
  misc_feature (971)..(982): n is a, c, g, or t
  misc_feature (987)..(989): n is a, c, g, or t
  misc_feature (992)..(992): n is a, c, g, or t
  misc_feature (994)..(999): n is a, c, g, or t
  misc_feature (1001)..(1009): n is a, c, g, or t
  misc_feature (1012)..(1014): n is a, c, g, or t
  misc_feature (1017)..(1020): n is a, c, g, or t
  misc_feature (1022)..(1022): n is a, c, g, or t
  misc_feature (1025)..(1031): n is a, c, g, or t
  misc_feature (1037)..(1038): n is a, c, g, or t
  misc_feature (1048)..(1050): n is a, c, g, or t
  misc_feature (1054)..(1060): n is a, c, g, or t
  misc_feature (1065)..(1079): n is a, c, g, or t
  misc_feature (1081)..(1093): n is a, c, g, or t
  misc_feature (1106)..(1108): n is a, c, g, or t
  misc_feature (1112)..(1118): n is a, c, g, or t
  misc_feature (1120)..(1125): n is a, c, g, or t
  misc_feature (1131)..(1133): n is a, c, g, or t
  misc_feature (1136)..(1138): n is a, c, g, or t
  misc_feature (1142)..(1146): n is a, c, g, or t
  misc_feature (1148)..(1171): n is a, c, g, or t
  misc_feature (1173)..(1177): n is a, c, g, or t
  misc_feature (1185)..(1189): n is a, c, g, or t
  misc_feature (1191)..(1192): n is a, c, g, or t
  misc_feature (1196)..(1199): n is a, c, g, or t
  misc_feature (1201)..(1217): n is a, c, g, or t
  misc_feature (1225)..(1232): n is a, c, g, or t
  misc_feature (1234)..(1239): n is a, c, g, or t
  misc_feature (1242)..(1276): n is a, c, g, or t
  misc_feature (1279)..(1292): n is a, c, g, or t
  misc_feature (1294)..(1322): n is a, c, g, or t
  misc_feature (1324)..(1331): n is a, c, g, or t
  misc_feature (1333)..(1336): n is a, c, g, or t
cggctgacggagcgagtagggggtgcgccgacccgactgccgcgcgaacttgtacacggtgnncgcgccctggctgagcttcttggagtaggcggcgttgtcgcggaacacgatggaggcagccgccagggcagcggcgacctcgccacccagatcaggggcggagctcacggacagtgaagggcgagggtacgccatgtcctccggccggttccagcagtaatggtcgtccggccggctgccgttgatcttagcagcacccacctgggcgtataacttgtcgatggtggaagcaagaggagttgaaggtgagtagcagatagtcggtgccccacttgatgagctccctgacatgnncntnctcccccatggccttgaacttggcgctgtactcaatagatagtcggtgccccacttgatgagctccctgacatggtcatactcccccatggccttgtacttggcgctgtactcgatnnngaaggtcttgaggatgtagtccgttccccacttgatgagctccctgatatggtcgagctcgccgatggccttgtacttggcgctgtactcgannnnnnnnnggnnnntnnnnnnnnnnnnnnnnnnaannnnnnnnnnnnnnnntcnnnnnnnnctggnnnncnntnnngtgtnnnnnnnnnncnnnnntccnnnnnnnnnnnnnnnnnnnnnnnnannnnnnnnnnnnnntnnnnttcnannnnnnntnnnnnnnnccannnnnnnnnnnnnnnnnntnnnnnnnnnncnnnnnnnnnnnnnnnanccnncnnnnnnacnnnnncctnntccnncannnnccnnnnnnnnncctnnnnnncantcnnnnnnnnnttnnnnnnnnnnnnnnttttannnnnnctnnnnnctcatcntnnnnngnnnnnnnnnnnnnnnnnnnnnncctncnnnntcctcccnntntnnnnnnnnncnnntccctnnntcannnnnnnnnnnnccctnnnccntnnnnnngnnnnnnnnntcnnnccnnnncnctnnnnnnnctgcgnncacttccctnnncaannnnnnnacctnnnnnnnnnnnnnnncnnnnnnnnnnnnnttcgcgctcccannngctnnnnnnnannnnnncatttnnnatnnnactnnnnncnnnnnnnnnnnnnnnnnnnnnnnncnnnnncctcaccnnnnncnnaccnnnncnnnnnnnnnnnnnnnnntctacctnnnnnnnnannnnnnacnnnnnnnnnnnnnnnnnnnnnnnnnnnnnnnnnnncannnnnnnnnnnnnntnnnnnnnnnnnnnnnnnnnnnnnnnnnnncnnnnnnnntnnnnacgctccctctt

SEQ ID NO: 4803 - DNA, 399 bp, Zea mays
gtctacaaccgacctcagaccccctgctacctgcacctctgtaaaataacgccgtcgccgtcgacccgtcgtcgccctctccctttctggtgtgcgtgtgacgcagcgatctctgtcgcagctcttgacgtctgaaccgtagctcctcccgctttgagccggcgcggggcgcgggcctcacgttccagctgccgcattgcacgtgttcagagaaagcgaacagaacagaacagaacagaacccgacccagaccctgaagagtctgaatgagtggcccatggccagtgagacgcgctgctgctggcaaatcagaggaggtgcagtgtaggcatcggggggaaaaatgtcttcttgggctcgtgctgcggcttcgtgcctgtcaatcgtcttcctactgtt

SEQ ID NO: 4804 - DNA, 871 bp, Zea mays
  misc_feature (864)..(865): n is a, c, g, or t
ctattgcttgaggcaagagatgttttcgggtggaaaggtctgataaatacttgcatgactgtttactactctctgaattgctctcattcactgttttcagcatttgttattttatgattttttatgcattgataggtagctgcttggaaggatgaagatggagattggtacgagactgggcttcatatcttttgtaagttacagttctggtccttgaggtcctcttcatcatatttcatgttcttgattatttcttttagaaaaattacagttaaaatgatggtttctacacatattaacaaactgttcagacacaccatcacacaaacttctaaggcactctttccttgtatcatgcctttatttttcctaatggcacaggactttctttcaaggacaatctttaaatacctgtgcaaagtcattattgtgaaaagaaattttgttaacttacagtagtgacaaaatagcctgaaaagtttgcagacaccttaaacatacagcagcacatgtttcaattcacataaaccatgttgatgatagaccatcatatccataatgccatagtcgaatatgtccttatgttcacatatcactggattgctaccattcccttcctagcatatatgacacttattatgtatgtgtatgtaaccatgtattttggatttttggtttaagttggagcttatcccaacatacagaatctgtttggcgagcttaggattgaggatcgtttacagtggaaagaacactctatgatattcgccatgccaaacaagccaggagaattcagccggtttgatttcccagaaactttgccagcacctataaatggtaagttatacacaacggtggagttanngcaaca

SEQ ID NO: 4805 - DNA, 406 bp, Zea mays
gaatcgacggggtgaataaaccatagataaatttaaattccgggatggatggatggtcgcagcggatgcagaaccctcacgtggacgtggagttccggagcgaaatcaagatcatggcgcgcatcgagcaccagagccttgttcgcttctacggctacatggagtgcggcgaggagcgcatcgtcgtcgtcgagtacgtccctaacggcaccctccgggagcacctcgacagtaagcgaccacctgccattgctgctgctctgcttccaactccatctgccatctctcacctcgcaagaaccaactccaaccaagcagggtgcaacgggcggttcctggacttcggcacgcggctcgacatcgccatcgacgtcgcgcacgccgtcacgtacctgcacatgtacta

SEQ ID NO: 4806 - DNA, 613 bp, Zea mays
gggcgtctccccttccaccgacatggaggatatgacctccacggcctccagagggatggaggccctggcattgacgggtggcccgtcgcattacggcgatgccgaagctagctccaatgtcctggcccagagggatgagccgactttagaccctaccgcgctcgcggcgtcttcaggtcattgcgtggaggttgccgaactgggtacaacgagggaggagtggcgtaggtagcgctgcgcccctcggtgccttcagtgccgccaaggcaccgcgcggggaaggagccggtggcaattcacccccccacacgacagaggtggtgcctcgggtggggctttaggtgacgccgcaacctccggcgccgttggcgccattggggcaccttgagggtagggagccgagaacaatccccctctgcgccttcggcggttgctcagaggaaggtgaccacctgagcgcgctcctcacagtctgtcctgttttcctgctctctggttctcatccttgctctgcgtttttctctgacttccttggtcagtgcttatgtgccgcgcaagatggtgaaggatgcggctttggtggcgaagggggggaacacctcctttgtccgtc

SEQ ID NO: 4807 - DNA, 518 bp, Zea mays
ttggtaccatctctctctctcactcactctctgacaatgtagaacttagctagtggcactgcactgggtcggtcaactgaatgagcctccctggatgcgatgcgactgcagcttgcatgggcgattgccgacgaggaccgggtgaggaggaggagcttcgcagaccccgcggtgagcaaagggtgctcggacgagtcgctgaggacggtcatggagatctgtcagaggtgcctggccaaggaggcgtcgcagcggccctcggtggaggacgtgctgtggaacctgcagttcgccgcccaggtccaggacgactgggagacggatgcctggagcagcggcggaggaagcccagtgtcgtcgtcgtccagagccaccaggccgtctcggctacacttgagcagatagatgatcaggtgcttcaccaatctccagtaaagcggtcacatgatctacccatagtctaccggggacaaggacaaggatctaaagatgggaaatgctggtcagcctacagtaca

SEQ ID NO: 4808 - DNA, 414 bp, Zea mays
agaaatattaaatagatcaccaccattgaacttgtatgtagtgggattcctactctgatagatcacaaaatcgacaagattacctgagaagccgttcctgctgagatcaacctcgacaagccgcatggaattctggaggagtgtctcaggcatcatcccgaatagcccattcccggcaacgctgaaaaactcgagcgagaaccaggcatcgagcctcggcactgtcccagcaagcccgttgttgctcaaatcaaggaccgccaagttcttgaacgcccccaccgtctcgttccggaagaagcccccgtccaggttgttgtggctgaggttgagatacctgaccgtgttcccgatgctggagaggctgcggaggtccaaatcgatggtcccggtgaagaggttgtcgctgaggtc

SEQ ID NO: 4809 - DNA, 403 bp, Zea mays
agcagctcgcccgggccgcgcgccctagcacgcgctcgcccagatcgcgcgcgtctctgctcgctccagccttctccctcttggttctctgctgctcgggctcctctccatggacgtccaggtctcttccccatgttggccgaccccatgttcgaactccgaaggcagacgtctctactcctcttcccatggcgacctcgccttcactgcctctatttttttcccccaagccgacgccctctccctcttatctttctctctgctgcagcgcccagcgccttcattttcccagccatggacaccagcgtccttctactcctccttccccatggctgtgcacctctctgcagcaacccatccgcaacgccgtcgaccctcggtgaggtcctgttctagctgtcat

SEQ ID NO: 4810 - DNA, 1316 bp, Zea mays
  misc_feature (757)..(765): n is a, c, g, or t
  misc_feature (769)..(772): n is a, c, g, or t
  misc_feature (776)..(778): n is a, c, g, or t
  misc_feature (787)..(798): n is a, c, g, or t
  misc_feature (807)..(829): n is a, c, g, or t
  misc_feature (831)..(831): n is a, c, g, or t
  misc_feature (836)..(842): n is a, c, g, or t
  misc_feature (844)..(846): n is a, c, g, or t
  misc_feature (848)..(856): n is a, c, g, or t
  misc_feature (863)..(866): n is a, c, g, or t
  misc_feature (868)..(872): n is a, c, g, or t
  misc_feature (875)..(880): n is a, c, g, or t
  misc_feature (883)..(887): n is a, c, g, or t
  misc_feature (889)..(893): n is a, c, g, or t
  misc_feature (895)..(907): n is a, c, g, or t
  misc_feature (909)..(912): n is a, c, g, or t
  misc_feature (916)..(920): n is a, c, g, or t
  misc_feature (924)..(924): n is a, c, g, or t
  misc_feature (926)..(926): n is a, c, g, or t
  misc_feature (928)..(934): n is a, c, g, or t
  misc_feature (941)..(944): n is a, c, g, or t
  misc_feature (946)..(946): n is a, c, g, or t
  misc_feature (948)..(952): n is a, c, g, or t
  misc_feature (956)..(957): n is a, c, g, or t
  misc_feature (959)..(974): n is a, c, g, or t
  misc_feature (976)..(980): n is a, c, g, or t
  misc_feature (982)..(986): n is a, c, g, or t
  misc_feature (990)..(1002): n is a, c, g, or t
  misc_feature (1004)..(1004): n is a, c, g, or t
  misc_feature (1015)..(1015): n is a, c, g, or t
  misc_feature (1017)..(1035): n is a, c, g, or t
  misc_feature (1038)..(1053): n is a, c, g, or t
  misc_feature (1056)..(1059): n is a, c, g, or t
  misc_feature (1061)..(1071): n is a, c, g, or t
  misc_feature (1077)..(1077): n is a, c, g, or t
  misc_feature (1079)..(1081): n is a, c, g, or t
  misc_feature (1083)..(1092): n is a, c, g, or t
  misc_feature (1099)..(1105): n is a, c, g, or t
  misc_feature (1110)..(1115): n is a, c, g, or t
  misc_feature (1118)..(1135): n is a, c, g, or t
  misc_feature (1139)..(1144): n is a, c, g, or t
  misc_feature (1148)..(1153): n is a, c, g, or t
  misc_feature (1155)..(1155): n is a, c, g, or t
  misc_feature (1161)..(1170): n is a, c, g, or t
  misc_feature (1172)..(1180): n is a, c, g, or t
  misc_feature (1182)..(1185): n is a, c, g, or t
  misc_feature (1191)..(1198): n is a, c, g, or t
  misc_feature (1202)..(1212): n is a, c, g, or t
  misc_feature (1215)..(1224): n is a, c, g, or t
  misc_feature (1231)..(1242): n is a, c, g, or t
  misc_feature (1245)..(1252): n is a, c, g, or t
  misc_feature (1254)..(1257): n is a, c, g, or t
  misc_feature (1259)..(1259): n is a, c, g, or t
  misc_feature (1263)..(1265): n is a, c, g, or t
  misc_feature (1267)..(1277): n is a, c, g, or t
  misc_feature (1279)..(1279): n is a, c, g, or t
  misc_feature (1284)..(1289): n is a, c, g, or t
  misc_feature (1295)..(1299): n is a, c, g, or t
  misc_feature (1305)..(1310): n is a, c, g, or t
  misc_feature (1313)..(1313): n is a, c, g, or t
tttttgctctatttcttttatattttaagcataaacaatttgctcgatacatacttgcagcagaaaccagttcattacttaaaatattacaaactattgagtattgaccagctactgaaaagtatacatcttatacagactattgctgtagtacctatgccggcgtttggtgtggcacagttcggttccatgcaaaaggttagcattctagttttttggaagcaattttcacacgattctaacagaaaagactacccatgatcataagtgtcttcattttggttgttacaagaacaattttgtctgtgtttcccttaagatgctatctttagattcataacagatcttgagaaaatgcactacgaaatctggcatgaagaataatcgaaatctatgagaatgcacattgtgagaaaaatctgtcttttctgcactatgaaacacttaaaaaatttgtgcaatgctaatttatatatttttgaaaaaaactagggacaaattaaaaaaaaatccctttcaaaaaaaaaaaaaaaactagggactcaatgtgcatacattctcatgaatactcaaagtttcacattaacaggtttctgaaagcttacagtttctggatcaagttaaaggtgcaacatttctgatggaaagtctttcatggtctccttcaacaaaagatgctcagaaagatgctttcatgtacaatccacaatttcaactcgattcttcaaccactaaagagggtcttcacgcactaagnnnnnnnnnaatnnnntccnnntatatcctnnnnnnnnnnnntctcttcannnnnnnnnnnnnnnnnnnnnnntnccacnnnnnnntnnnannnnnnnnntttctcnnnncnnnnntcnnnnnnatnnnnntnnnnncnnnnnnnnnnnnntnnnnaaannnnntctnanannnnnnncaaaccnnnncnannnnncatnncnnnnnnnnnnnnnnnncnnnnntnnnnnatcnnnnnnnnnnnnncnaaatcaacaancnnnnnnnnnnnnnnnnnnntcnnnnnnnnnnnnnnnnatnnnncnnnnnnnnnnncccaancnnncnnnnnnnnnnaccttcnnnnnnnctccnnnnnnccnnnnnnnnnnnnnnnnnntaannnnnnctcnnnnnncnctcccnnnnnnnnnncnnnnnnnnntnnnnctctannnnnnnncacnnnnnnnnnnntannnnnnnnnncaatctnnnnnnnnnnnnctnnnnnnnnannnncncctnnncnnnnnnnnnnncnactcnnnnnnaccctnnnnncctcannnnnnccntct

SEQ ID NO: 4811 - DNA, 690 bp, Zea mays
  misc_feature (377)..(378): n is a, c, g, or t
  misc_feature (483)..(484): n is a, c, g, or t
  misc_feature (487)..(487): n is a, c, g, or t
  misc_feature (554)..(555): n is a, c, g, or t
  misc_feature (570)..(570): n is a, c, g, or t
  misc_feature (581)..(581): n is a, c, g, or t
  misc_feature (626)..(626): n is a, c, g, or t
  misc_feature (628)..(628): n is a, c, g, or t
  misc_feature (653)..(653): n is a, c, g, or t
  misc_feature (655)..(655): n is a, c, g, or t
  misc_feature (657)..(658): n is a, c, g, or t
  misc_feature (669)..(670): n is a, c, g, or t
  misc_feature (674)..(676): n is a, c, g, or t
catctatcgattagatgaagcatctgcgttatctaagctttaatctggactgttctcatcgcagtgtggagcttattttcccaagcacatttagcaaactttaccatatgcagagcatatatagtgagaaaatttcctgcgccaaagacgtgacacaaaatctcacttccttgcggcacagctcttcgtcgtggatgggatttgcaaacgttggcaggctgacgtcgctccaatcgctacggtacttccaagtgaagagagaacaggggcacgaactgaagcagctgaagcacctgaacaaccttcgaggcactctggcgattgacggtctgggggtcgtcagaagcaaagaggaagctcttgaagcacacctagannccgtcagtcgccagagtgcctcgaaggttgttcaggtgcttcagctgcttcagttcgtgcccctgttctctcttcacttggaagtaccgtagcgattggagcganntcngcctgccaacgtttgcaaatcccatccacgacgaagagctgtgccgcaaggaagtgagattttgtgnnacgtctttggcgcangaaattttctnctatatatgctctgcatatggtaaagtttgctaaatgtgcttggnanaataagctccactgcgatgagaacngncnnattaaagcttnnatgnnncagatgcttatcta

SEQ ID NO: 4812 - DNA, 477 bp, Zea mays
cccagcagtttctgctggtgtgaatataaatttcagagatgctcatggatggactgcactccattgggctgcattttgtggcaggtaagcgtttcagagtgatattgtatatgcacatattctatatgcatactgatgttgtttcacctgttatccagagagcgaacagttgttgcacttatcgcacttggtgcggctcctggagctttgacagacccaacgccaattttccctacaggaagcacaccagctgatctggcatcagctaatggatacaaggggatctctggtttcttggccgagtcttctttaacaagtcatcttcagaccctcgatcttaaggaaggcaaggggagcaatccgccagaaatatccggtctgcctggtattggagatgttactgaaagaagagcatcaccattagcaggtgaaggtcttcaagctggatccatgggagattcactaggtgctattcga

SEQ ID NO: 4813 - DNA, 1512 bp, Zea mays
  misc_feature (505)..(513): n is a, c, g, or t
  misc_feature (515)..(517): n is a, c, g, or t
  misc_feature (520)..(525): n is a, c, g, or t
  misc_feature (528)..(533): n is a, c, g, or t
  misc_feature (535)..(537): n is a, c, g, or t
  misc_feature (542)..(543): n is a, c, g, or t
  misc_feature (553)..(559): n is a, c, g, or t
  misc_feature (565)..(567): n is a, c, g, or t
  misc_feature (569)..(570): n is a, c, g, or t
  misc_feature (577)..(584): n is a, c, g, or t
  misc_feature (588)..(591): n is a, c, g, or t
  misc_feature (601)..(614): n is a, c, g, or t
  misc_feature (618)..(618): n is a, c, g, or t
  misc_feature (620)..(630): n is a, c, g, or t
  misc_feature (633)..(641): n is a, c, g, or t
  misc_feature (647)..(647): n is a, c, g, or t
  misc_feature (650)..(650): n is a, c, g, or t
  misc_feature (654)..(656): n is a, c, g, or t
  misc_feature (658)..(660): n is a, c, g, or t
  misc_feature (662)..(671): n is a, c, g, or t
  misc_feature (673)..(677): n is a, c, g, or t
  misc_feature (680)..(681): n is a, c, g, or t
  misc_feature (684)..(687): n is a, c, g, or t
  misc_feature (690)..(690): n is a, c, g, or t
  misc_feature (693)..(698): n is a, c, g, or t
  misc_feature (701)..(702): n is a, c, g, or t
  misc_feature (705)..(707): n is a, c, g, or t
  misc_feature (710)..(720): n is a, c, g, or t
  misc_feature (727)..(734): n is a, c, g, or t
  misc_feature (740)..(742): n is a, c, g, or t
  misc_feature (748)..(748): n is a, c, g, or t
  misc_feature (750)..(751): n is a, c, g, or t
  misc_feature (753)..(762): n is a, c, g, or t
  misc_feature (767)..(771): n is a, c, g, or t
  misc_feature (775)..(779): n is a, c, g, or t
  misc_feature (782)..(784): n is a, c, g, or t
  misc_feature (790)..(809): n is a, c, g, or t
  misc_feature (813)..(815): n is a, c, g, or t
  misc_feature (817)..(817): n is a, c, g, or t
  misc_feature (820)..(832): n is a, c, g, or t
  misc_feature (835)..(861): n is a, c, g, or t
  misc_feature (865)..(873): n is a, c, g, or t
  misc_feature (876)..(876): n is a, c, g, or t
  misc_feature (878)..(904): n is a, c, g, or t
  misc_feature (906)..(913): n is a, c, g, or t
  misc_feature (917)..(919): n is a, c, g, or t
  misc_feature (921)..(928): n is a, c, g, or t
  misc_feature (935)..(936): n is a, c, g, or t
  misc_feature (939)..(948): n is a, c, g, or t
  misc_feature (951)..(954): n is a, c, g, or t
  misc_feature (961)..(977): n is a, c, g, or t
  misc_feature (983)..(986): n is a, c, g, or t
  misc_feature (988)..(999): n is a, c, g, or t
  misc_feature (1004)..(1012): n is a, c, g, or t
  misc_feature (1016)..(1031): n is a, c, g, or t
  misc_feature (1035)..(1044): n is a, c, g, or t
  misc_feature (1054)..(1059): n is a, c, g, or t
  misc_feature (1061)..(1062): n is a, c, g, or t
  misc_feature (1064)..(1065): n is a, c, g, or t
  misc_feature (1072)..(1077): n is a, c, g, or t
  misc_feature (1084)..(1086): n is a, c, g, or t
  misc_feature (1091)..(1091): n is a, c, g, or t
  misc_feature (1093)..(1094): n is a, c, g, or t
  misc_feature (1102)..(1107): n is a, c, g, or t
  misc_feature (1111)..(1120): n is a, c, g, or t
  misc_feature (1122)..(1122): n is a, c, g, or t
  misc_feature (1124)..(1145): n is a, c, g, or t
  misc_feature (1149)..(1151): n is a, c, g, or t
  misc_feature (1154)..(1168): n is a, c, g, or t
  misc_feature (1174)..(1181): n is a, c, g, or t
  misc_feature (1184)..(1184): n is a, c, g, or t
  misc_feature (1201)..(1206): n is a, c, g, or t
  misc_feature (1208)..(1209): n is a, c, g, or t
  misc_feature (1211)..(1213): n is a, c, g, or t
  misc_feature (1216)..(1217): n is a, c, g, or t
  misc_feature (1221)..(1224): n is a, c, g, or t
  misc_feature (1230)..(1233): n is a, c, g, or t
  misc_feature (1236)..(1244): n is a, c, g, or t
  misc_feature (1248)..(1254): n is a, c, g, or t
  misc_feature (1257)..(1258): n is a, c, g, or t
  misc_feature (1261)..(1261): n is a, c, g, or t
  misc_feature (1270)..(1274): n is a, c, g, or t
  misc_feature (1276)..(1279): n is a, c, g, or t
  misc_feature (1281)..(1292): n is a, c, g, or t
  misc_feature (1295)..(1296): n is a, c, g, or t
  misc_feature (1298)..(1312): n is a, c, g, or t
  misc_feature (1318)..(1321): n is a, c, g, or t
  misc_feature (1323)..(1333): n is a, c, g, or t
  misc_feature (1335)..(1335): n is a, c, g, or t
  misc_feature (1342)..(1343): n is a, c, g, or t
  misc_feature (1347)..(1348): n is a, c, g, or t
  misc_feature (1351)..(1354): n is a, c, g, or t
  misc_feature (1356)..(1356): n is a, c, g, or t
  misc_feature (1359)..(1364): n is a, c, g, or t
  misc_feature (1367)..(1379): n is a, c, g, or t
  misc_feature (1385)..(1385): n is a, c, g, or t
  misc_feature (1389)..(1393): n is a, c, g, or t
  misc_feature (1399)..(1399): n is a, c, g, or t
  misc_feature (1404)..(1412): n is a, c, g, or t
  misc_feature (1414)..(1414): n is a, c, g, or t
  misc_feature (1416)..(1417): n is a, c, g, or t
  misc_feature (1422)..(1447): n is a, c, g, or t
  misc_feature (1449)..(1456): n is a, c, g, or t
  misc_feature (1462)..(1464): n is a, c, g, or t
  misc_feature (1468)..(1480): n is a, c, g, or t
  misc_feature (1482)..(1493): n is a, c, g, or t
  misc_feature (1495)..(1500): n is a, c, g, or t
  misc_feature (1502)..(1509): n is a, c, g, or t
ggggggctattgttacttctgtactgtgcatttgtaagccttctttccagtggtgttttgtgcatgctcaccacaaacttattcacccccttgcgcataggcataatctcaggaaagtcctcatcttctgctagactacttaagtcagctgaatcttgaagttgagatactttgctcaaccatctttctgcttttttatcactttcagcaagttttctctcaatttcagatttaccagcactcgttacactaagaagctgtgccacaccacctaaaccagaaccaacagatgcaggaatcgatgggattgttgctggcctcttgcaatcacattttaaacatgacatattcctcccataattatagaaatcacaccttagcaaaagaacaaaacacagtcagctatttcaaagatatataagcttaatacaaatattttagcaattagcatgtcagatcttactgagggcattcccactctccaccagtcagcatcttcttaaannnnnnnnnannnctnnnnnnttnnnnnntnnncctcnntcccgggaannnnnnntcccannntnngatcttnnnnnnnnccannnntacaaaaaannnnnnnnnnnnnnctanannnnnnnnnnntannnnnnnnntcatanctnccannnannncnnnnnnnnnntnnnnncannccnnnncanttnnnnnnctnnatnnncannnnnnnnnnnccccccnnnnnnnnctaccnnncccctncnntnnnnnnnnnncactnnnnncccnnnnnctnnnacacannnnnnnnnnnnnnnnnnnnctannnancannnnnnnnnnnnntannnnnnnnnnnnnnnnnnnnnnnnnnnctcnnnnnnnnnacnannnnnnnnnnnnnnnnnnnnnnnnnnncnnnnnnnncatnnncnnnnnnnntcccctnntcnnnnnnnnnncgnnnncactcannnnnnnnnnnnnnnnncccccnnnnannnnnnnnnnnncacgnnnnnnnnnatcnnnnnnnnnnnnnnnncctnnnnnnnnnnctcaacctcnnnnnntnncnnccccccnnnnnncttcccnnnccctncnnctctcccnnnnnncccnnnnnnnnnncnannnnnnnnnnnnnnnnnnnnnncctnnnacnnnnnnnnnnnnnnntccccnnnnnnnnctnctccccccccctccccnnnnnncnncnnnacnntctnnnnctcccnnnnccnnnnnnnnnctcnnnnnnnctnnccnccacctcannnnncnnnncnnnnnnnnnnnnccnnannnnnnnnnnnnnnncccttnnnncnnnnnnnnnnncnactaccnncctnnctnnnntntannnnnnctnnnnnnnnnnnnnctcctntcannnnncctccncacannnnnnnnntntnncctcnnnnnnnnnnnnnnnnnnnnnnnnnntnnnnnnnntcttcnnnatcnnnnnnnnnnnnnannnnnnnnnnnncnnnnnnannnnnnnncct

SEQ ID NO: 4814 - DNA, 365 bp, Zea mays
cgacgattttatcaacgaggtcgccatactctcccaagtgaaccacaggaacgtagtgaaccttttcggatgttgcctcgagacagaagtcccgttgctggtctacgagttcatttcaaacgggacgctccacgagcaccttcatgtcagtgctccacagtccttatcatggaaggagcgcaagaggatcgcccttgagatcgcgcggtctcttgcttacctgcattcttctgcttccatgtcgataatccacagagacataaagacagccaacatactgctagatgatcggctagtagccaaagtgtcggactttggggcttctcgaggcatccccatctatgagacttctgtgacgacgacca

SEQ ID NO: 4815 - DNA, 815 bp, Zea mays
tcttgtctccgtctgtctgcagcacgacgatgaaatctgagctgcgtgagtccgtacttcagagacttcgcacggtcaaaattagcaaatgctgactgatatccatgggaatgtgaaatttcagtggcattgttacttacgggcccaccgaggtactgaaatccagccaactctagctccttcagaatcccttcctctccgataacatacacctatattctggacgttaaacttcgcgcatgtttcgcgcgtacgttatttcgaatggcgagaggtaccttcttgtccttggggaaatcgatggactgcaggtacgcggcggctgcgaaagacgaagcgaagatctcttcctgcgcacaagcaagcagcgacccgcggccggcggtctcatcggttagcagcagcaggcagcagcagcagcagaggaaaccgacgaacagaagcgggttcatgacgaggagtgccgattatattaagaacccggccaacctcgtcgacgctcagccccagcgtctcgaacttcctgccgtactgcttcctcgacttggtggagttgttggtcacgaacaccagccgcttgccctgaaacggccggcgtaccagccagcagcactgcagcttcagtgggaacgagaggggatcgaggaaagcgttgtggttttgggacggacacggacctttgatcggagcaggtcgagagtctccggcacgccgtcgatcagcttgtcgcccttccagatcacacctgcgcggcacacgacacgcggacgcgcgagtttaaggcagacccatcacccattcacgcccactaccca

SEQ ID NO: 4816 - DNA, 375 bp, Zea mays
caaaggttcaagataatcaaagacgtagcgtcaggcctgctgtatctccacgaagactgggagaaggtcgtcgtccaccgggacatcaaggccaggccagcaatgtgctcctcgacgcggagatgagtggccggctgggcgacttcgggctctcaaggatgtacgaccatggcacggatccgagcaccacccatgtggtcggcacgatcgggtacctagccccggagctcgggcacagagccaaggcggcaccagccactgacgtgttcgcgttcggcgtgttccttctcgaggtcacgtgcgggaggccgcccgtcggggaggacgacgctcaagggagccaggccgtgcttgtagactgggtgcttcaccact

SEQ ID NO: 4817 - DNA, 408 bp, Zea mays
gccgcaagatggcccgcgacatcgagctcgccaggctcaagaagcaggccaaggccgagaagaagcagcagcagcagagtagtgccaacaaggagttcgccgactccaagcctctcgacgccattcttgcctgatatggtagagggcgcgcgagactaccgtaccgatccgttgttattgctgcgtgtgattaattttcatctataagaacatagctacgtacgtgcgatcgaccgtgtggtgattaattaaggtctgaataaaataatggctgcacaaaactaggaagcgatcgatcacccagataaatgtatgtgcgttcccttttctttcaatatgtgtaatttttcaacgtgcggttccagatgcatggactggactggaccggagtgcattgtaattctttat

SEQ ID NO: 4818 - DNA, 394 bp, Zea mays
cctcccaactgtggtcaactcgccggagataccggtatttccgctgatggagcagacgccggcgccgacgccagctacagagcagggcgctggcgcctgtggtgcacaaggcgttggagtcagcgtcgacagggcggaggccgcgccgaggaaagactggcacagcaagatatgcaccgccggcgggatgagggaccgccggatgcggctctcccttgacgtcgcccgcaagttcttcgagctgcaggacatgcttggattcgacaaggccagcaagacggtacaatggctcattaacacgtccaaggccgccatccaggagatcatggccgacgacgcgtcgtcggagtgcgtggaagacggctccagcagcctctctgtcgacggtaagtac

SEQ ID NO: 4819 - DNA, 1425 bp, Zea mays
  misc_feature (1364)..(1370): n is a, c, g, or t
  misc_feature (1405)..(1406): n is a, c, g, or t
ctctaaggatttgctagctgtttgtgccctgaattttacttcgatagaataatcgatttagttgtctgtttatatattgtgcagccaaatgtgccagctgagtttcggtctcatattggtggagctgctgtatctgcagcaaaggtgaatgtttctgaacattagtatatgcttaggagacaaatttgttgctctcagttcactattgttagttaagatcttttcattatctacctgccaattttttcgcaccaatatagaatgacaaatgtgcaagcaatttgcttcacatgactgccagttcaaagttatatgtattatctaatggatcattttagtagactttttttttctaataatactcaacagttggcaagctacctatcatttttcatgctatctgtcataaaacaagtggttctttctttgttttctctgttgatatgtttttagcagttattctgtttaatccttctgtttcacatatagggtcatttattggattgtttgtgttgaaggcagttggttactacaatgctggaacagtggagtttattgtggacactctttctggagagttctacttcatggagatgaatactcgactccaggtaatatatctatgataataatctgatatgattaagtaccttggcatttctttttgcatggtacttcattgatttacttgttaaaattctaaaacacaaaatcatcttgtgaatcaatcttggaaggttgaacacccagtgacagagatgattgttggtcaagatcttgtggagtggcaaatacgtgttgcgaatggagaacgactaccattatctcaggagcaggttccattaaatggtaaaccttaaaaataactcattgtgttacccaaaaaattcactgttgattcctgattgtcatgttgcccctcttagctactataggttgttcgcatcatgaacagcattgtgaatcttatctagttctataatttgaagatactgcctttaattattagcttaacagtacactgtaatgcaactaattggatacattttggtacttggattatcatggtattctgctgtttttaatgcaaactggctctagcctggctggctagctcatttgagagtggggtctatattccttttatacaagcgttttttccaaacattatcacttcattacttgtacccaagtatccattaagacatttatttatgattctgaaaactgaactgcatgctgctattggtttatgaataagaagctcacaattattttgttttcctttgaattggcttatctatatttgcatatgagccttctaaagttatagcgccactcatccagattacttcttaactatnnnnnnntttgatataggacatgcattcaagcacggatatanntgaaaagtccaagaggtct

SEQ ID NO: 4820 - DNA, 373 bp, Zea mays
tcagaagcgactggagcctaagacagccacgcaggcgcccaagcgaaagcccaagaagcagcagcagcagccagaggcggtgacgctcgagaccggcgcagcgccggtctcgccggagcagtcagcagtctccacgtcgaccaccagcaccaccactgactactcggcggcctcgtcgtcgttggagaacgcggatagcttcacctcggaggaggaggactaccagattgacgacagcttctggtccgagacgctggcgatggcggtcgacagttccgactccgggatggaggaggcagagggcgccttcggcgcgtcgccgccggcgccgtcgaccaacgacgacgtggacttctggctcaagctgttcatg

SEQ ID NO: 4821 - DNA, 573 bp, Zea mays
caatcttgctccctgattccagagcttgatcccttccgctggcatccacaaccacaaaactccctaggattcagagcggacacggagactgaaactggtcataaagccagttctatctatgagaactaatcaactccttgcgaatcactcaccgttcttgatccagaagctcttctggaacttggcagggaacaaggccagggacttgatgccctcgccgtcaatcacctaccaataaagcatgtcgattaggaaactaaacggtgcgtgactggacccggaagccccgcgaagcatcagtaagcgcctcacctcgatgacgttggagccacgcagcgtgaggacctgcatgatgctctcgccctcggcgagcgtgacggcggcgccttcgtcgcacgcccgccgcaggttcttcctccccgccttcatctgctcctctcccctctttgacgggtacaggtacgagggaggcggggctttgtttcccggggaccaaagcacgtgaaagaaacgacgacgggcagatacggcggcggcggcgaggggagcaaaactgtcacgggtcagataaag

SEQ ID NO: 4822 - DNA, 1471 bp, Zea mays
  misc_feature (447)..(448): n is a, c, g, or t
  misc_feature (559)..(559): n is a, c, g, or t
  misc_feature (561)..(563): n is a, c, g, or t
  misc_feature (565)..(565): n is a, c, g, or t
  misc_feature (567)..(570): n is a, c, g, or t
  misc_feature (572)..(586): n is a, c, g, or t
  misc_feature (589)..(595): n is a, c, g, or t
  misc_feature (601)..(601): n is a, c, g, or t
  misc_feature (604)..(612): n is a, c, g, or t
  misc_feature (614)..(614): n is a, c, g, or t
  misc_feature (617)..(617): n is a, c, g, or t
  misc_feature (620)..(624): n is a, c, g, or t
  misc_feature (627)..(629): n is a, c, g, or t
  misc_feature (631)..(634): n is a, c, g, or t
  misc_feature (637)..(649): n is a, c, g, or t
  misc_feature (652)..(658): n is a, c, g, or t
  misc_feature (660)..(663): n is a, c, g, or t
  misc_feature (669)..(687): n is a, c, g, or t
  misc_feature (689)..(689): n is a, c, g, or t
  misc_feature (693)..(694): n is a, c, g, or t
  misc_feature (700)..(717): n is a, c, g, or t
  misc_feature (720)..(725): n is a, c, g, or t
  misc_feature (728)..(740): n is a, c, g, or t
  misc_feature (747)..(747): n is a, c, g, or t
  misc_feature (749)..(750): n is a, c, g, or t
  misc_feature (752)..(760): n is a, c, g, or t
  misc_feature (762)..(766): n is a, c, g, or t
  misc_feature (769)..(770): n is a, c, g, or t
  misc_feature (772)..(775): n is a, c, g, or t
  misc_feature (782)..(789): n is a, c, g, or t
  misc_feature (795)..(796): n is a, c, g, or t
  misc_feature (798)..(801): n is a, c, g, or t
  misc_feature (803)..(810): n is a, c, g, or t
  misc_feature (813)..(820): n is a, c, g, or t
  misc_feature (822)..(822): n is a, c, g, or t
  misc_feature (827)..(828): n is a, c, g, or t
  misc_feature (830)..(843): n is a, c, g, or t
  misc_feature (846)..(857): n is a, c, g, or t
  misc_feature (862)..(873): n is a, c, g, or t
  misc_feature (885)..(913): n is a, c, g, or t
  misc_feature (915)..(915): n is a, c, g, or t
  misc_feature (917)..(920): n is a, c, g, or t
  misc_feature (926)..(928): n is a, c, g, or t
  misc_feature (934)..(956): n is a, c, g, or t
  misc_feature (958)..(977): n is a, c, g, or t
  misc_feature (982)..(984): n is a, c, g, or t
  misc_feature (989)..(1000): n is a, c, g, or t
  misc_feature (1004)..(1005): n is a, c, g, or t
  misc_feature (1008)..(1009): n is a, c, g, or t
  misc_feature (1013)..(1013): n is a, c, g, or t
  misc_feature (1015)..(1018): n is a, c, g, or t
  misc_feature (1028)..(1036): n is a, c, g, or t
  misc_feature (1038)..(1041): n is a, c, g, or t
  misc_feature (1043)..(1075): n is a, c, g, or t
  misc_feature (1077)..(1098): n is a, c, g, or t
  misc_feature (1101)..(1103): n is a, c, g, or t
  misc_feature (1107)..(1114): n is a, c, g, or t
  misc_feature (1116)..(1126): n is a, c, g, or t
  misc_feature (1128)..(1136): n is a, c, g, or t
  misc_feature (1139)..(1145): n is a, c, g, or t
  misc_feature (1151)..(1158): n is a, c, g, or t
  misc_feature (1163)..(1163): n is a, c, g, or t
  misc_feature (1167)..(1174): n is a, c, g, or t
  misc_feature (1176)..(1178): n is a, c, g, or t
  misc_feature (1180)..(1183): n is a, c, g, or t
  misc_feature (1185)..(1190): n is a, c, g, or t
  misc_feature (1192)..(1200): n is a, c, g, or t
  misc_feature (1202)..(1204): n is a, c, g, or t
  misc_feature (1208)..(1219): n is a, c, g, or t
  misc_feature (1223)..(1227): n is a, c, g, or t
  misc_feature (1229)..(1229): n is a, c, g, or t
  misc_feature (1234)..(1240): n is a, c, g, or t
  misc_feature (1245)..(1245): n is a, c, g, or t
  misc_feature (1247)..(1259): n is a, c, g, or t
  misc_feature (1262)..(1262): n is a, c, g, or t
  misc_feature (1264)..(1269): n is a, c, g, or t
  misc_feature (1271)..(1284): n is a, c, g, or t
  misc_feature (1289)..(1301): n is a, c, g, or t
  misc_feature (1307)..(1307): n is a, c, g, or t
  misc_feature (1309)..(1315): n is a, c, g, or t
  misc_feature (1317)..(1323): n is a, c, g, or t
  misc_feature (1325)..(1350): n is a, c, g, or t
  misc_feature (1355)..(1368): n is a, c, g, or t
  misc_feature (1371)..(1377): n is a, c, g, or t
  misc_feature (1384)..(1390): n is a, c, g, or t
  misc_feature (1397)..(1402): n is a, c, g, or t
  misc_feature (1407)..(1410): n is a, c, g, or t
  misc_feature (1412)..(1426): n is a, c, g, or t
  misc_feature (1430)..(1438): n is a, c, g, or t
  misc_feature (1443)..(1445): n is a, c, g, or t
  misc_feature (1448)..(1449): n is a, c, g, or t
  misc_feature (1452)..(1460): n is a, c, g, or t
  misc_feature (1462)..(1462): n is a, c, g, or t
  misc_feature (1464)..(1467): n is a, c, g, or t
agcatttgatgggctgcgacagagatcctaaacctgttgtcaggcgggatcctcccaaagtcgatgcccttccagaatggctgagcacaactgggaaacgttccaacgaagatagggcactttgcagtttatggactaggaatgccataggagttttattcccatctttatcatttggaagtgcaaaagatataaatgctttgtatcgtctgactgcctgatgacgcaaatttggtatgtttgcctcagacaccttttccctcccaaatgttccacatgacagataggttagcaaagccgtaacaactccacttccgatgaactcaaatgtcgaaacaccatcacccttgctaagctcagacaacatttcagctattatatcatccaattgctcctcaatattgcacaaaaattcatcggctcctctcccctcttcgacgtatgggnncaggtacgagggaggcggggctttgtttcccggggaccaaagcacgtgaaagaaacgacgacgggcagatacggcggcggcggcggcgaggggagcaaaactgtcacggtnannnangnnnntnnnnnnnnnnnnnnntcnnnnnnncccaantannnnnnnnnangantannnnncgnnnannnnagnnnnnnnnnnnnnctnnnnnnntnnnnaagtannnnnnnnnnnnnnnnnnntntgtnnatcccnnnnnnnnnnnnnnnnnngcnnnnnncannnnnnnnnnnnngtctaangnnannnnnnnnntnnnnnacnncnnnncaatcgnnnnnnnncccgannannnnannnnnnnnccnnnnnnnnanccacnncnnnnnnnnnnnnnnacnnnnnnnnnnnnacccnnnnnnnnnnnncttccatccacnnnnnnnnnnnnnnnnnnnnnnnnnnnnntncnnnngcgccnnncccccnnnnnnnnnnnnnnnnnnnnnnngnnnnnnnnnnnnnnnnnnnnttctnnnttcannnnnnnnnnnngatnnatnntccnannnncccccccccnnnnnnnnnannnntnnnnnnnnnnnnnnnnnnnnnnnnnnnnnnnnncnnnnnnnnnnnnnnnnnnnnnncannnctcnnnnnnnntnnnnnnnnnnnannnnnnnnncgnnnnnnnacaatnnnnnnnnccctngtannnnnnnnannntnnnntnnnnnntnnnnnnnnncnnnatgnnnnnnnnnnnncctnnnnncnccttnnnnnnnacaanannnnnnnnnnnnnccncnnnnnntnnnnnnnnnnnnnntcatnnnnnnnnnnnnnctcacncnnnnnnnannnnnnntnnnnnnnnnnnnnnnnnnnnnnnnnnatctnnnnnnnnnnnnnntannnnnnnctccctnnnnnnncattcannnnnngctannnntnnnnnnnnnnnnnnntcannnnnnnnnccccnnnccnnccnnnnnnnnnantnnnnccga

SEQ ID NO: 4823 - DNA, 1186 bp, Zea mays
  misc_feature (53)..(56): n is a, c, g, or t
  misc_feature (1125)..(1129): n is a, c, g, or t
  misc_feature (1173)..(1173): n is a, c, g, or t
cacgacgtacttggatgccatgtagccgccgccgttgaggcctccggtggcannnnggacgatcacctgcacaagctgcgccagcgagaagtcgacgctcgtcgtacctgcccactgtgtgtgtgtgacatagtttaatcaacaagactatcatcgggtgcagactctgcccttcgccgccagagctgactgtgcccaaagcacgcaaaaccaggtatgtagtgtggactgtggagtactctggctggctagctagctagtactctcattttttttacaccgcattaattggaaaaagtttaataatatagccgactgagtctatttgcagtctctctcagttcatccgtataattatagttagctcttcaatattttttgcaaaaccagcacttaccatctcttgtaaagttttttttggttcttgtgtctaacccagctgcagtccgttttccctatgtctcctctccactcctctctctctcttctgcatcggcatttagcctgcttaccacctctcgttatacttgctcttatgtttgtaatataagacagaaatttctaaatttggctctcgatttcaaagaacctatgtgtaatgtattgcgtattatggaagtacttgactagattatgaagaatattttaatttcagcatggatgaaaatacgcagtgtatactatatgtgttgcagctagctagtcagctatgcacgcatgaatctgtgaagcaagattgatcaggccggcgtacgacgtacgtacctgtcccacgatgttgaacctgcacatgcaagatcgacggggcggcacaatataaaagatgaaacttggttaggcacagcacagacgacacgacacgtacgctagacgattggaaatgtcgcctaataagtagctatatatatatcatatattaacagaagtaataaataataaaagcggaacgcattgtttatttgacacgtaccatccggtgagccaggaagcgaggggagcccagtccttgccggcgagcttagcgctccagtagtagaggccgccggaggtcgggtacgccgagcagatctccgccatggacagcgccacgcatgcgttgagggcggacacgaggaaccagcccannnnnatggacaccggcccgccgtagcgcaggccggtgtgtaggtgatntcacgcccatcag

SEQ ID NO: 4824 - DNA, 921 bp, Zea mays
  misc_feature (535)..(535): n is a, c, g, or t
  misc_feature (540)..(541): n is a, c, g, or t
  misc_feature (590)..(590): n is a, c, g, or t
  misc_feature (592)..(779): n is a, c, g, or t
  misc_feature (782)..(794): n is a, c, g, or t
  misc_feature (796)..(804): n is a, c, g, or t
  misc_feature (806)..(895): n is a, c, g, or t
  misc_feature (900)..(902): n is a, c, g, or t
  misc_feature (907)..(918): n is a, c, g, or t
taggctgctgaagggccaggaaataggcgtaggatatcagccagtaaggcgcgtccttcagcccgtgcatcttcatcattagtcttagcctctgctgcttctcgtagacaaggtatgtcaacattacctatatatgaaaaaaaaaagttgactttgtttacgagttcgctgaagctcagtgagtacagtaagacttgactcactggaaggaggagctgaaccgtccaggtgaagaagagggcgtccaggagagtggtgaggtccagccgcattttgattgcagctttgggcatctctttcagaaactccaggcgcatttctgtagtccctccttttaataacaagttcagatatgcagtggacgcctacaatggaaatgcatagccaacatttaaaaaaaaagtataatcatatattaaggttcagctatttctcactcaaaaagtatgctgaaagcaaaaaaaaaaaaaaaaaaaaatggggggggggggggttggggccctttttaaccccccgggaaaaccccaaaaccccnggggnngggggcccctttcccccggggaaagggggggttcaccaaaaaaaaaaanannnnnnnnnnnnnnnnnnnnnnnnnnnnnnnnnnnnnnnnnnnnnnnnnnnnnnnnnnnnnnnnnnnnnnnnnnnnnnnnnnnnnnnnnnnnnnnnnnnnnnnnnnnnnnnnnnnnnnnnnnnnnnnnnnnnnnnnnnnnnnnnnnnnnnnnnnnnnnnnnnnnnnnnnnnnnnnnnnnnnnnnnnnnttnnnnnnnnnnnnntnnnnnnnnntnnnnnnnnnnnnnnnnnnnnnnnnnnnnnnnnnnnnnnnnnnnnnnnnnnnnnnnnnnnnnnnnnnnnnnnnnnnnnnnnnnnnnnnnnnccccnnnccctnnnnnnnnnnnnccc

SEQ ID NO: 4825 - DNA, 434 bp, Zea mays
ttgctgcagtgccaaagaagtatagagatgaaaggactgttcaacaggcccttacagatttaacttgggtgcaagatattcagggaaatctctcgctgaccggtattgagcaatatcttcagttatgggtagttcttggcggatttcagttacaaaataataatgacaatcgtgtgtggaggtggaggtgacaatggactctaaattttacactataatatttaaggatcggatcggattaggatctgaccctatttctattcatttttgaactaaaattttatttagggccctaccattttgcgaagaagcatttggatcacgatccattaccacccctatgtggaggtttagtagtaatggcttgtttagctccagatcagcctacagagccttcttcattggaactgaaacctttgagtcttgggaaaggg

SEQ ID NO: 4826 - DNA, 412 bp, Zea mays
  misc_feature (377)..(379): n is a, c, g, or t
  misc_feature (381)..(382): n is a, c, g, or t
  misc_feature (385)..(391): n is a, c, g, or t
  misc_feature (394)..(395): n is a, c, g, or t
acaccatgccgtagctgtacacatcagccttgctgcccactgcctcgtagctcctcgagaagacttcgggcgctatgtaccctaccgtgcccctcgccccggcgatggacaccctgctcgccttctgcccgcacagcttcgccagcccgaagtccgagatcttgggacacatgtcctggtccagcaggatgttgtgcggcttgatgtcgaagtgcacgatgcgggtgttgcagcccgtgtggaggtactccagccctcgcgcgactccaacgacgataccgaacagcctgtcccagctcaaggcgtcttctccactgctgctgccgaaggtgtacctctcgagggagccattgggcatgtactcgtacaggagaaannngnntannnnnnngcnnatcggtctcgtagttgg

SEQ ID NO: 4827 - DNA, 419 bp, Zea mays
cctgcagctggtcatcaaggagacgctgaggctgcatgtcccggggccgctgctgatcccaagggagtgccaggagcagtgccggatactgggctacgacgtgcccaggggagccatggtgctcgtgaacgcctgggccatcgctcggagcccggatcactgggaggagccagacgcgttcgtccctgagaggttcgtcggtgacgcgagggatttcaagggcaacgacttggagttcatcccgtttggcgccgggaggaggatctgccctgggatgtcgttcgggctggccagtggccaacgtcgagctcggtctcgccagcttgctcttctacttcgactggagtctcccggcgggcgtccttcctgctgagatggacatggccgagaccatggggatcactgctaggaggaaagca

SEQ ID NO: 4828 - DNA, 996 bp, Zea mays
  misc_feature (944)..(944): n is a, c, g, or t
tgagatctacagcagaaacccctcctgctcacacatattcaaatatattagcttttcaagtcatatataaaatttaaaatgtagaactaaaataaacttgacacattattaacaaaaacacctaacgcttttatataacatggtcaggaaaaaaatgtgtaaatggttatgcaattgtgtcttaatatctaattttttcgttccctcaaatcactgtgatctactaacatgagtcgaacactaatacttgcatgtaatagtgatataccttccgcaatgaattgatgagggtgccgagtgggggagagttaacttttgctcgtctcgaaatctgaatttgattggaaaaaatagaatcggtgcatgattaaattttgctaagccagtaaatgaaccaagcagattgatgaatgagtgaatattgaactccaagacatacctcatcaagtcttatatatccaggaggcaacctcgggtcactctcttcaatcatcatgccaagaagtttttccaaagagacaccattttcaattgtgcatgcccatccccattcgttggccaagcctagcatttcggtaaggaaagaggcatcgtggagaggacctgtccaaagtgggcctacaacagtgattgaatcggcatcctgtgaaaaagggacaattatatactagcacagttccatggccaagtactccaaaaacaacgcaactcgatcaggtttcttgcatggcataggcatacaattatcatcgaagattattcattagtaaaccaacatcagggttagctacaaatgatatcgttccttaaatgacacttgagtacttgactcctatgttattttgtgttaattaatactgacaaagttaaatggttagggcctaagtttcctgaatcaaccaccagtaataaaacaacaatttagtcctgccacaatgatccantgtacctactgttgtgtctgtacatccacaagaaatctgccccagctcatca

SEQ ID NO: 4829 - DNA, 439 bp, Zea mays
tgggcctcgccgctcatccgcctcaccaacaagcccaacgccacgatcgaggacatcggcagccccgagaggctgatcgcctcgctggggcctttcgtcaccggcaacaccttcgactccgacgagctcgtcgacaccaacgtcgagaacgtcgatggacagactgtaacttactgacctcgagcatcacctgcaaatcttttctgctctcggactattttagcgagcgagcgagctgcttatgcgggtcactgttcctgtcatgcagtactacagctacgtgctggagactccattggcgctaacaggttcgcacaacctggccaaggccaccgccaaggggagcacggtggtgctgttcgtcgcaagcgccaacgacaagcagtggccggcgtcgcagaaggttctgaaagccatagtggactcgtttcaaatatga

SEQ ID NO: 4830 - DNA, 376 bp, Zea mays
ctgggcagctggtggatctaccgtgtgtcattcaagtgcaaagagctggtgtagaatatattttagttctgaagagcgagttaaccatgtggtgctgaatagcagatattttgaatcatttctaactgaagtaggtacttgaattggcttttcagtaggtgctgtattactgttttttgaaagcagcgatgtccaatgttttgctagagtattttgcaagaatataatggaagtatggagcccggtggccggtgctatttctcacagggcataaagcaattccatgtggaagatacatttcttgtcacatagcaaatcgttgtcctgggtgtgttttctgtacaatcgccaatggattgcattatgtcccaaatgt

SEQ ID NO: 4831 - DNA, 454 bp, Zea mays
cgcactcgtagtagcactaaaaaaaaagtcaagtcagaggcggcgacaccccgcgtcacgtgccgtcggtgcggcaggaacgataagcgctcgtcgcgcctagatctcacccatacaaaattcgtttgcgccatgcagacgcgccacgccaaccgtctctgccgagccgccgtcgacttcctgcctcagataaaataaaaggttgatccttgcgtgcgtgccgctgatacgactcccgaccgggtccatttcggcggcacgccccgccgcgttccccaccgcgctatattgcgtgccgctgatacgagtccacatcgccatcgcgtcccacacgctcacagtcacagcatggcacgccaccctctcgcggctgctgtcctcttcctctgcctgctgtcggtctgccgcgcggccggcgccggcgccggcgccgctggcaaaggtaaaccgagca

SEQ ID NO: 4832 - DNA, 396 bp, Zea mays
  misc_feature (389)..(390): n is a, c, g, or t
gttccatgaccaaaaaagatgcgatgaagcaaggctgaatgctctgtcagaagaaatggacctactcaatgccaagatcgacgagctatccagcgagagaaacgacctctctgaaaagaacgcgcagaaagacaaggaactggccggaatcagtgaaaaggacatgcagttgcaagacaagactgctgagatcacttcactaaataaggagcttgtatctctcaaagaccaagtgaagacgcatctggacgaactgcacgatttaaaatgtctgaaggacaggaaggaggagacaattggaaaactgcaaatagatattgggtcactgaaactccagtgcgacaacttgaagacttcgctgtccaagaaggagtccgagaaagataacnnttgcct

SEQ ID NO: 4833 - DNA, 434 bp, Zea mays
gtcgactcggccaacggatacattggctttggacccaccacctgctagatcaaatctgtgtgtctgctgcctaaaacaaagctagcttactcggtcgggcgggcgggcggactcatgcatgcgttgggttggttctaaataggccatacgggatgagagtatatagagtccttgtagtacgtaaatttgaggtaacaaaaggttgaagaaggcagtgtgtgtgtcagtccagcaccatgatgaatgttgtgcgcctgcactgaaaccgtgggtgatggtctctgtacagatcgtagcatgaacattttcactttgtgcaaggctgcgatgagatgggacgaacatgttcacttggcttgtaaaaggggccaaggctgcgacgcgatgaacctgtttcacttgccttttccaccgtgactaaagtacaatcctca

SEQ ID NO: 4834 - DNA, 404 bp, Zea mays
ggctggacccgctcaactcgtctgaggaccgccacgacgaccgcgacagtcgtgccagcggcacgcgcgcggggagcgcggccgagagcagcgagaacgaggcggagagccagtccacgtccgcggacaggaaggacgggggcaagtcccgccattgtcgcagcctgtccatagacagcttcatgggcaagctcagcttcgccgcaggggaggagtctccgaagctgccgctgccgtctcctggtggcagcctcaccaggagcgggagtggctcactggaaggtggtgctgtcgcgctgttcaatatggagtttaccaacggagagtttaccgactccgagaagaagaaaattatggcgaatgagcgacttgctgagatagctttgacggatcctaagagggta

SEQ ID NO: 4835 - DNA, 456 bp, Zea mays
aaccaactacagcaaagggctccaggtactgttttttctttctttctttctcgttactttgcaatacctgaaaacatcagaaggaaggaaaaaaaaagaagaagaaaaagtcgagctggacgactgagccccatctaacagcagcagtgctggcctttcaggcaaggaagaagctcgtggcaatgctgcggcagatgatcgctgaccggaggtcctctggctgcgcccgagacgacatgctggacgtgctgctcagcggcaacgagggtaccagggcgaagctcagcgacgaccagatcatcgaccttctcatcaccctcatatactctgggtacgagactgtgtcgaccacctccatgatggcggtgaagtacctgtcggaaaaccccaaagctctcggacagatcagggtacacataacttctgcaaccgagctcaattccacagccaaaaaaa

SEQ ID NO: 4836 - DNA, 677 bp, Zea mays
ggttgcgtctcgcggcgggttctttgctcccggctgtggaagacgccgacgacgaggcctccttctgccggatcttcttgcgcagccgcgcgttccagaagttcttgatctcgttgtccgacctccccggcagcctcgccgcgatttgggaccagctaatacagataatgaccatcaaattagttcacaatcgacgacgacggccgggtcggtcgggttactatgagatggccatgcgtaattaaggcaagctgaggcaatggcgggaggcacatctgctgttcagcagagaggaggtcagttacctatttccaagtgctttgtggagagctatgatgaggtcttcttcctgctgggagaagcggccccgcttgaggtccgggcggaggtagttcatccaccgcagcctgcagctcttgccgcacctctgcaagcctacaaacacaactacaaccagttcactcactccgtccgatcccatccactactactatgtcagcaaacaggtctcagtggtgacggcattgcaaatttgcaacagcgtcaagaatgcatgcatatatatgttcatcacctgcgagttcggggatggagctccagcagctgacgccgaagcgcgcgatgtgggaggcgagcctctcgtcctcctccggcgaccacagacccttcctcacctt

SEQ ID NO: 4837 - DNA, 383 bp, Zea mays
caaaccaaaccaaaccaaaaacctttttgctagcttattcacagacagcagcttccaaccaatcaaactcatcgaccgatcgagtgctcgtacaccaatagctcagccagccatcaaatcctagctggaggtgcgtacgtacttggctagaggaggtagacgacgacggcgacgacgaccgacatgccgtcgcagcagcagcagcagcagggccagcaggtggcggcggggtcgacgcggtggtgcccgacgccggagcagctgatgatcctggaggacatgtaccgcggcggcctgcgcacgcccaacgcgtcgcagatccagcagatcacggcgcacctcgcctgctacggccgcatcgagggcaagaacgtccttctact

SEQ ID NO: 4838 - DNA, 400 bp, Zea mays
gggtggttgggcagagtgctgtcggtgcttcccgagcggcccatgtccgtgggcgggtcccccaggcacggcgtgtacgaaaccacggacttcgggtggggccggccggcgagggtggagatggtgtcggtggagaagacgcccgggacggtagcgctggcagacagcccggagggagacggaggcatcgagctcggggtggtgttgccgccggacgccatggatgcatttgcttcgtgctttgcgcatgccgtcggcgccaacgtctgattggcattccgatccgaggtgcagctgctgccttcaacaacacaggaccaaaagattcgattgaagcagcgtattatttgtgcttgattaattgatttactttactgtcttgagagtgagctcgttcttg

SEQ ID NO: 4839 - DNA, 386 bp, Zea mays
aattctcaagaagaaattctagaagctgagagggctttcaaagttaaatactttttggttttggttgacatggcaatcacctctttgaaaacaagattcgaagaactattgatatttaaaggtgtattcagatttctattgagttcaagcaccctgaagtcattaaatgatagtgaacttcaagagtgttgcattaaatttgcagacactttctctcatgatggttcatctgatgttgaggtacttgatctgatttctgaattaaagattttgaaattcactttgccagatcacacattatgtgctatggagatttttgagcatatcagagatgtgggttgttatcctaatgcatgtattgcttatcgaatcttattccaccgtgc

SEQ ID NO: 4840 - DNA, 416 bp, Zea mays
  misc_feature (226)..(226): n is a, c, g, or t
  misc_feature (229)..(234): n is a, c, g, or t
  misc_feature (262)..(267): n is a, c, g, or t
  misc_feature (270)..(272): n is a, c, g, or t
  misc_feature (274)..(276): n is a, c, g, or t
  misc_feature (283)..(288): n is a, c, g, or t
  misc_feature (290)..(290): n is a, c, g, or t
  misc_feature (302)..(303): n is a, c, g, or t
  misc_feature (305)..(307): n is a, c, g, or t
  misc_feature (335)..(337): n is a, c, g, or t
  misc_feature (364)..(366): n is a, c, g, or t
  misc_feature (370)..(370): n is a, c, g, or t
  misc_feature (375)..(380): n is a, c, g, or t
  misc_feature (389)..(393): n is a, c, g, or t
  misc_feature (399)..(411): n is a, c, g, or t
cgtcgtgtaggagtagtcgtcgtctgtggtgttcgacgcgccgccgcccgtgggcctgcggctagacctgaacctggcgctgccgccggccgagatggtgatgtgattgctgccgtccaggaggctaatcgattgctcagttaattagtcaccattagtagctaatcgatcaaggcagccgtcaggcagaggtgtaaataggatgcagatttgctcggtaacttgncgnnnnnncctccgctggtctcgtgaccaagcactnnnnnntcnnncnnngcggccnnnnnnangttcttcttatnngnnncggactgtccccctgggcggtcctgtgnnncccttgtacggggactcctcctcctgnnncgtnttctnnnnnngggcgcctnnnnnttcctnnnnnnnnnnnnncgccc

SEQ ID NO: 4841 - DNA, 444 bp, Zea mays
tggtctttcacaatgctaactgcattggtcgagcacacgaggaggagctattcaaaccgctatgtcgttctgcgtgcgagccttcaaggaattcgccttcacgcaactgctccatgggccggccaatcagagagctcagggccaagtcgtcccgtcctttgaaccggctcaattgacctcgtattctcaccttcgtttcgtagcaactagcaaccgtgacactctgatttgtcctctaagcacgcgccatatcagttcaccagctacttgttccggttgctatcggccatcgccatgtcgtcgtccctgtacaagcagctgggcctttcgggagccggctccccgctctccggccgccacctcgccctcctcgtcctcggcgccggcttcctcgcgctcaccgtcttcgtcgtccaccctaacgagttccggatccaatcttta

SEQ ID NO: 4842 - DNA, 396 bp, Zea mays
tcgcaagaagtaacgatcccatgttcgcctacaacggtttctccaacaccaacctcgagctcgacggcacggcctccatcacggagaacggcctgctcgagctgaccaacggcaaggtcatgagcaaaggccacgctttcttcccggatccactgcgcttccgcagatcccccaacagcacggttcagtccttctccgcctcgttcgtgttcgggatcatctcggtgtacaacaaccttagcagccacgggctggccatgttcgtcgccccaggcaaggacttctccgccgcgacgccggtgggctacctgggcctcttcaacgcgcagaacgacggcaacggcaccaaccgcgtcttcgctctcgagctcgacacctaccagaacagcgagttca

SEQ ID NO: 4843 - DNA, 719 bp, Zea mays
atttgatttggatggacaagagatgacaagtgaagctcaatctgtgtcagctattcatgaagcaagagagggagaaggtagcaaaagtagaaagcgtaagcagagccatgttggagcagctctcgaagactatgtggagttcaaaaagagccaaactaacaaggcacttgatgctctcaaagaactttccatgaggaagtgtatggaggaaatagaagcaataggtggattcacagaagaggagaagtcatatgctgtggaggtctttgagtccgggattaatagagaggctttcatgtcaacaatgaaccacaatgttcaaagaatgtggctaaagcgcaaaatcaggtatgtccatagttaagcatgtaacaaaaaatagctttatgattttggtttcagcttacatgagcacatattcatagtgtttacatgagcagcaacatcttcatagtgtttacatccgtccatgttatatcattagacaaccaatttacataactgcatccttgaatggtaaagtagcttgtaggatacttggaacatagccttatgatgtttatgcatatggtgcatatttgtgcatacattgcttggatgtgggtttttctttgtgcatatagtgcatatttcctagttgtaaaatgttggtacatggtgtaaactaaaccgtgtgtcaattggtgttacttggtacttgtagagtgctgagtggaagc

SEQ ID NO: 4844 - DNA, 362 bp, Zea mays
atctgctcccggctcactcctccggctcggcggccgggtcggctagtgtgggcagcacagggtacttgcgcgagaagcacgcgtcgcagtagtccctcgactcttcgccgtagatgctgtgcagcttgcccagcgagaggaaggcgagtgagtcgctgccgatctcccggcgcacgccatccatgtccatccgattggagatgagctcgccctcgctcggcgtgtcgatgccatagaggcaggagcccacaactggtgggctcgcgatccgcatatgcacctcccgcgcgccggcgtctcggagcagccgcacgatcttgctcgaggtggtgccgcgcaccagggagtcgtccacgaccaca

SEQ ID NO: 4845 - DNA, 401 bp, Zea mays
  misc_feature (392)..(392): n is a, c, g, or t
cttggtgtggtggccgacattttccggggccccttcctccctctggatctcgtacgtcgcccactcctccgctgtcgtcccgtgatgtgcagtgccgttaggcgttgctcttcatgaggcaaagtgacaagttgaagcatcaagctcaaccttctgttgccgagcgtctattcataccctcgagttttattcgatttcagttttattagtgcaggcggtatataatacgtcttgccgtggctttaaaaatggcagctatgctgagatagcagtaacgtacgagacatagtttgggcataacaatttaaaagcccaaaacattgcacgttttccctatattcaaattccctgtcggtaatttttatccatgcacacgagtttagaaggacgangctgtttga

SEQ ID NO: 4846 - DNA, 370 bp, Zea mays
acacccgtacagataatgaagcagctagcttcatcctggcgcatcgacctgcagcaacttatcaattagggttacattgattgtcgatatatgggttaatttgaatatttgaattgttcgtttccctctggttcttgtctggtctttagctattagtattaggaatattatattgggtggggtggaagtggcactgtgttgaaatggattggttgtattggaaaatatggtattgatgttgtctcaccttcattgaggctagggagcaacgaagaaaaattctaggttgggttttagatctccatcctcgtcctggtcctggtgacggaaaaagtttcctgcggggatcccataaactcttgcccgtatt

SEQ ID NO: 4847 - DNA, 365 bp, Zea mays
ccaccactcaatccatgaaaaaaacttttaactggacttccaaagaacatagcatccccactgaacagctctttcatggttgtgacaaagtcctgttgctccatgtccgggaggtaggctgctagacggagtctatcatcttccgtcaggcatgaattccatgtctccaaagaaagaacctcggccaagccaccatgcaggtcataaatcccataggggatattgcacatctggcctctcgacgatgcaagctcacagtccacctccgcctggtcagagccaagagattctggatcaggaaagctctggagaagcattctgtcctctcgtgtaaggtcctcacctccacaactgtaaccactcct

SEQ ID NO: 4848 - DNA, 715 bp, Zea mays
atcgattatgacctggctgtgctcatgcagcctatgctaatgcttgggatcagcattggtgttatttttaatgttatattccctgactggctggtcacagttctgctgataattcttttcctaggtgcttatcttgtaccgattcccaaaactatgaaatagctcatttattgttcatgaatgaccttacaccttcaaaattgatgacaggcacatccacaaaagcctttctgaagggcattgagacatggaagaaagagacagtaatccaaagggtaatcttttgtgacttccttgtctcctttgttaacaatgaggctttggcttacatatatatttttttacatcctatgatatagtaatgtgatagccttcttttcttccaggaggctgcgaaacttttggagcaaactgcaggtaagagagagagaaatatatgtgctcatctgtcacaaatactggatctattccttaccttttttcaaccgttcaggtgaggaagcagagtatgcagcacttcctactggaccagatgttgcaccaaacaaaaaagccctcacatcagatgaggcggtaaacatctaatgatcatatgtgtactcagctgcactcttttgaaactatagttgtaaggattttaatctagaaagtttccactgtttcagccatcgcttataaagaacatacactggaagaaggttggtcttctttcatt

SEQ ID NO: 4849 - DNA, 430 bp, Zea mays
gcttcagccttgagatcagacctcgcctttctgttctgacccctgcctgcctgccccaaacacaagctcccttagtcgtcgtagtcctctcgtttatcggttggtggacagtgtggatactgcgagagatcgatcaaaggaagaagagggaacaatcaagaagaagaagaagaagaagagatcgtttagctagggggtgcaacagcagaagaagaagaggaagtggaagaggaagagatctgtctcatcagtacgacgtacttgttgttggatacatacaaagatatatatatgtctcatcaggcgacggcgatgatgtccggcggcggcggcgcggggcagttcggcgacacgacgttgaccaaggtgttcgtggggggcctcgcgtgggagacgcacaaggacggcatgcgggcctacttccatcatt

SEQ ID NO: 4850 - DNA, 405 bp, Zea mays
ctggcgtcgcggaggctcatgttcttgcagcgggtggcctacctcaatgtcggcatctaccccttcacctccatcttcctgctggtctactgcttcatcccggcgctgtccctcttctcgggcttcttcatcgtgcagacgctcaatgtcgccttcctctgctacctgctgaccatcaccgtcaccctcatcgcgctcggcgtgctcgaggtcaagtggtcgggcatcgagctcgaggactggtggcgcaacgagcagttctggctcatctcgggaacaagcgcgcacctgtacgcggtggtgcagggtctgctcaaggtgatggccggcatcgagatctccttcaccctcacggccaaggcggccgtggacgacaacgaggacatctacgccgacctctacgta

SEQ ID NO: 4851 - DNA, 446 bp, Zea mays
cctctaggctcgacactaacaccatcatcaccctccatgctcaggctgtcggtgttcacaacatccggccccttgtgttcatcgtgttggatctggcattccttcactacccccactgacgtgatcaggtgctcctcacgctccggtggttcgccctcgtcgacgacgttctcgacgacgtcgtcgccccattgtctccatctggcaccagatggacaacgtggtcctctcgtggctctatggtaccctcaccatcgagctccaggacatcgtccgtgagcgggagggcatcgctcgccaggcatgggtcgccctcgaggaccagttccttgggaaccaggaggctcggacactccacctcgacgcttcgtttcgtctgttctcctagggggacctatccatcagcgagtactgccgtcggatgaaggacatggcatactctctaa

SEQ ID NO: 4852 - DNA, 403 bp, Zea mays
cgaagaggctcaaggaactggtggatccagcccttgtagactgccctgaggaagaagccatcaggtacatcatggtggccctcttctgcctacaggcggccgccgcgcgccggccgacgatgccccaggtcgtcaccatgctgtccaagcccgtccggatcaacgagagcgagctgacggcgccggggtacctccaggagtacagcaggcggagccccttgtccaaggccaccacttccaccgactccaggttcaagaacctggcgtcccaggaggactccaacatgttcagcacggtggtgccacccacggtgaccgagatgagccccaggtgaagcaaccgccatgtaattttgactgattccttccttgcgttttgtcaaccggcgactatatgatgtaa

SEQ ID NO: 4853 - DNA, 891 bp, Zea mays
  misc_feature (864)..(867): n is a, c, g, or t
  misc_feature (869)..(869): n is a, c, g, or t
tttcttttccgctcctcacataacagttcgactgatgattgaatatcatagccagtcatcttcaatgccctttttgcagaccgtgcttcatagcccatatccattaacattgatatagcttcgtctggcacttggagctaaatttcatatccgtttcacaaaaattaagatttaaactgatttgctaaacatgaaaagatgctaaagcactgaggttcagaggaataatatgctataagaagaaaataaaatatattttttacagaatgtacctgcaggtatttagcatgggcagaagtgagagattcacgcgccttttcaacatgaccattatggtatgccaccactccttccaaaagctccagccttacataactattacacaccaaaggaaaaaaaatgtatgctaggcatcaacacaagtgaactgtagaatgcttcaaaaggaaagtacccataaagaaccaagactagaacaagcttaataaactcctagttggtttcttaaaaaaacatatatctatattgctatagttccttccctctattggtcctttttccctttcgaagaagaagataccaggaccttccattcatccacacatgcacagatagagaaacctttttccataaatgttcccatacatttgtgtctaagtagcaattcagacttctgattgaaaatgagcacattcggtaaaaaaatataatacagcaagaggcaaataatagtaagggtctcacatagcaagatcagcttgccggccagcctggagtattctgaagcgggtggaatctttcccatgagaacgctcaaaacctaaccgtgctttttctaggcgggcccctgcgacctctagcacnnnnanaaaaaaaaaaaaaaaaaaaaaa

SEQ ID NO: 4854 - DNA, 382 bp, Zea mays
cgagcccgacatgggtgacaaggtccgcgctggcggcgtcgtgaggatccagtacaggagggtgccgtgcaagtaccccggcgtgaacgtggcgttcaaggtggaccagggtgccaaccccttctacttcaacgtgctgatcgagttcgaggatgctgacggcaacctcaacaccgtcgacctgatgttggctgacaacagagagtggacacccatggcgcacaactggggcgccacgtggtgcctcaacaacggcaggaggctcagagcgccgttcggtctccggctcacctccgactccggcagggtgctcgcccccaacaacgccattccggtcgcgtggaagctcggcaagacctactgttccttggtcaactaccca

SEQ ID NO: 4855 - DNA, 764 bp, Zea mays
  misc_feature (643)..(647): n is a, c, g, or t
  misc_feature (666)..(666): n is a, c, g, or t
  misc_feature (670)..(671): n is a, c, g, or t
  misc_feature (681)..(682): n is a, c, g, or t
  misc_feature (690)..(691): n is a, c, g, or t
  misc_feature (713)..(714): n is a, c, g, or t
  misc_feature (722)..(723): n is a, c, g, or t
  misc_feature (726)..(730): n is a, c, g, or t
  misc_feature (739)..(739): n is a, c, g, or t
  misc_feature (741)..(741): n is a, c, g, or t
  misc_feature (747)..(747): n is a, c, g, or t
gttggctctgtaaatctactagcgactgagatttccttttccgtatttcgttcacgaaatggcgatcttggttcagtggcccctaagcatttctcctgtggcttctaacatgtttgtatccccatagatttgttcagcagaagttgggtggcccgtcaatctctgactatgaaaagctcaaggcagagaagctggacttgcaattgaagtatgataagcttttagaaacccacaaggaaacatgcagacaggtatgtgatgttactgtgttggcactgtacactactctgtctatttacacggcacatttaatgttcagtagcatttggtgttacaactttcaccaaatttgcgtacgtggatatagatactccacagaaatgtcatgtatgattaagaagggttagttgttattgtcttaaagcttactgcttgtttgaagtaattctgcttatttgatgatgaaactcctgcactccaataatgtactcatagcaacaattctgtctttaacttaagtgcgggatgttctgaattccactagactgcataatgttcagctgacccaattggatgtttttggatgtagaaataccaatatacattaaaaaaaactcattttcatcacactgtgatctggcannnnngttctgtcatgtaaggccnggtnnttctcctcanntcatcatnnttgtgttttggttctatgcatnnaaattttnnttnnnnngaaagggangntgcggnaaggagtgatggcattt

SEQ ID NO: 4856 - DNA, 391 bp, Zea mays
tcttcactcacctcagcccgcttgctgctcacgcttttgtgctgtggttctgctcggtgtggatagcgctagcgtgctaatccaggttcagtctcagatgcgccatttgctttaccatgtgcggtcatgtgctgcgtgctgtattgatttgcatctaagctcgtattgatgcccgtgtctggggtgtggtggtgccatcctccattcttatcatgcaatcttgcagcagtgagtgctgcggtactactaccatgtaccttgtacaagatgccgtcccttcccttctggtcgctgttccgttcaccttcaccatgctctgccccctctatttggtaggtggtgctggcagtggtggttatgcttttatgacatcttctaccagtccgtcaga

SEQ ID NO: 4857 - DNA, 473 bp, Zea mays
ggtactgacatcataacagaatgtgcactcgccaaaagtttttagcaattcaactctagtcaattcagttgaactattgccacaaaattcataggtttccaccgaatgatctccaacagcaaacaggcactgagggagggaagcttgaactccttgccgcaagttattgttcaagaagtgattaccaaggtttgaatcatctgaaatattgtttccggcgtggtagtattcatcaagtttaatttgggcaattgatgccttgagccttacattttttggataagtctgcagatatcaacaagaaaaaatatcaaataccaagcttggtgaaactaaaatgatgcatggactaagaagccctgatgtaccagtaccagtacagacaaaatgaatacctgtagatcaagatgaatgttctcacacttggctttgagatgatgcatatttaagctggaagctgtagcaggagataa

SEQ ID NO: 4858 - DNA, 1180 bp, Zea mays
  misc_feature (43)..(44): n is a, c, g, or t
  misc_feature (1118)..(1118): n is a, c, g, or t
aggacccagcaaccacggcctctgaacaaggtactctgccttnntgttcaacaagcaagcaggagcaaggttgctgtcatgcccgtcgagttggagaaggcaaaggagccaccgctccacctgtacaaaccaaaggagccttacacggccacgatcgtctctgtcgagaggcttgtaggacccagagctcctggcgaaacatgccacgttgtcattgatcatggcggcaatgttccgtactgggaaggacagagttacggcgtcattcctcctgtaagcatctcctgcctagtcctgccaagcgtaatgataatgaatttatactttttcgtcctttcatctcactataccacaacaccaaattagcgtcggacgactatcgctataaatagagaattctcgtcgaactgtaactctggcaagtttgcactggacacttcatagtctgcagttcgtatgcttttttattgctatatgatcctttattgatcacttctgctctaaataagatagtattgttcagatatatatgctattgatattatggttaaatctcgtcagaaatttgtctgtatacagcagtgtatccagtatttccaattctgtgagtgttgatggtgtgacaaacagtgttaaaacctaactatggcttgtaaggcaggcccttgtcaaaaatttctgggaaattctagcttggttgctgttagcaaagcatataaaaacatgtaggtcattttgcgcagagaagattagttaacaccttttttgtgcagagaagactagctaacaggccttcttagactgtgactttagaagatctattttcttatcccttttagcagtactagtctagtgttattgactttctaccccctcgggctgtcctagctctctggtccaccttgaacctccttccttatttctgctcttgtacagtttttctctctactgtttctcgaacattgtcgagcttctctttattttaataaaaatttacagtggggggctcccctgctgtattttcggttcattttttactttttttatctgcacctgcttttactgtatctaataacatgttttttcacagactaacatataatttgttgtcaggaaangaatccaaaaaaaccgggatctcccaatactgttaggctctattcaatgctctactaggtat

SEQ ID NO: 4859 - DNA, 358 bp, Zea mays
gctcctctgccgactgcgcacggtgtgccggttgtggcggtccatcctctctgacccgcacttcgccgcggcccacgccatgcggcacccggggccgctcatcatcgccgccatcgatgagagacccgacgtgcacgtcaacatcatggatctgtcagggcaaatcttaaagcaggtgcgcggcgtgccgggtcagagagtcgtgagcacggccgcccttgacctcgtctttgtcaagaaaaccgatagcagcagcagcagctaccgattctgcaacccgtttagcggagacgtgcattacttaccagatcaattgctcaacccagcaactggagctgtgtatcaaataccaaacagc

SEQ ID NO: 4860 - DNA, 386 bp, Zea mays
tgatggggctggacatctcgaccgccggtgacatgtgggaccagctggtgtgggactacgacgaaacgttggtcacggaaccggaaggaggggaggaagggcaccagcagcaggacgatgtcatgtcagacctcttcttcctggacaatctctaggaggtgcgaggatagcatgggcatggctgccgtgatgctttatgctttttaatttgatccggtacttgtaggtttttgggtgtgttcagttcagagatgagtggcggtgtcagagacgagataaggggagtgctccagtgacatctttgtttgctggccggatctcacgaacccgtagaatggcaagaatgtagaaaaataagcacgcaatatcacttggaaacctttcat

SEQ ID NO: 4861 - DNA, 345 bp, Zea mays
ctgcttctgcttcatgaagacggccagcagcaagacccaacacggcggcggcagcggcaacaaggagggagcagcagcccaccagcagcagcgcaccggtaaactgcaaggaggaggagtagtggtaggcaaggccatggagatggtgtagcttaccatgcatctttgtccagtatcagctgcttatatatactagctagctattcttcttgcattaatattgtgcatgcgtgccttggggacaggttctttagtaatcttgtgtgctagctgcgtcgtttaatttctccagcactccagtagtccagtatctccctccaggctggctagtgaactactgctgta

SEQ ID NO: 4862 - DNA, 378 bp, Zea mays
atcttgggacgcaaggtgagctacaccccactgaggggaagccccagcaacgggaacctgtacgtcgtggatctcgtcgggctgggcctcggcggcccggacctcccgatcccgcccgccgccatcgccggagacgacaccatcctcgagctgcacacgacgttcacctacctcaagccccaggtgtacgcggtcctccgcgacagcttccgcaagtccatgtcggagtaccctgccgcgccgccgctcggaagcctggacacgtgctacaacttcaccgggttggacgctttctccgtgccggccgtgacgctcaagttcgccggcggggcagacgtcgacctctggatggatgaaatgatgtacttcaccgaccca

SEQ ID NO: 4863 - DNA, 397 bp, Zea mays
cttgtcaacaagccaaaccggaccgtgctaaatatccgggtctccttcagccgttaccagttcctcctcaagcctggcacacagtttcactagattttgttgaaggccttcctcgatctgggcatgcaaattgtattttggtggtcattgataaattctccaagtacggtcattttctacctttgttacatcctttcacggctgcaaaggttgctaaggtattcttggatcacatctacaaactacatggtttgcccactgtcctggtgtccgaccgagatcgtgtgttcaccatcacattttggcagacctttttttagctgttgggtacacaattgagtatgtcgtcctcataccgtccccaaaccgacggacaaactgagcgtttgaatcaatg

SEQ ID NO: 4864 - DNA, 370 bp, Zea mays
agcgtgtcctctcgaccagccaaccatggcgcccacagatggagacagaaaccagatccgtcgaaagagatgcttggccgccgtgccgatactgtgcattaattctgacaagacaagggccgcccgtctaaattgtctccctaactttctgatcggacggcggggagagccaaacaaacagggaaatggcacatgcgactccatgccatggccatagcagtaagcagcaatttgcatcggacagcgagttgcagccgaccacgccaaggtgaaggacgggtcactctggtcaccagaggggccaactgcacccagatctgctagtccacgcctctcgacacttgtccgagttattctacggctggataaa

SEQ ID NO: 4865 - DNA, 521 bp, Zea mays
ggggtttcagtagtaattcgcagagttctgttagcgccatgctgccaatgcgcatgccccgaggcatctcgcagcaagaacttgaactcgatcgacctgttcgccggcaaatcctggccagacgtaaacgatcgagtcaggctcacatggcccgggtcgctgaaggaacgcatgtgaccggagacctcaccgtgttcgccgtccagacgtggccttctgaccaaaccaaggagatcgccttagctggatcccaaagcccgagcgccgcgtcgtcgccggcgacgaggaactgctggccgaaggcgcactgcttcctcagcacgaacctgacgcgcactgtcttccttgcctcaggaactggcacggtcagattcacgaggcgtgccaacgttagtgtagtggttttttttgtcgtccgtgtaaaccacaccgctgacggctagagagctcataccgtgagcagcagcgggaggcaggttttcgacggaaacaatggagttcagatcatcctcatcctcacc

SEQ ID NO: 4866 - DNA, 412 bp, Zea mays
attgtagtagtgaggaagggaaagagagcagcatctcgacctctctttgttagagagtttgcattgcagctgcaggtggggggtcaactgcgaactcaaacacttgttcttggcttggttggtggtaatattaggagcgaggtgatggatcaactgttcttttattatctttctttctgttcagttcattgtggcaggaaccatcctttgcatttgtttctaaacaactcaatggttggagaccacatcagcatcgctggctatttttgctggatccaacacaactctttcttctgcctgttattatctgatctgctctgctgcattcgtttgtgcacctaccactaccagatggatacctcatagtttgaccagctcgctccttcctggctaccttgggtgttgtttatca

SEQ ID NO: 4867 - DNA, 1333 bp, Zea mays
  misc_feature (343)..(343): n is a, c, g, or t
  misc_feature (345)..(351): n is a, c, g, or t
  misc_feature (358)..(365): n is a, c, g, or t
  misc_feature (367)..(368): n is a, c, g, or t
  misc_feature (370)..(372): n is a, c, g, or t
  misc_feature (378)..(378): n is a, c, g, or t
  misc_feature (380)..(380): n is a, c, g, or t
  misc_feature (382)..(384): n is a, c, g, or t
  misc_feature (386)..(389): n is a, c, g, or t
  misc_feature (412)..(412): n is a, c, g, or t
  misc_feature (414)..(418): n is a, c, g, or t
  misc_feature (421)..(421): n is a, c, g, or t
  misc_feature (423)..(435): n is a, c, g, or t
  misc_feature (445)..(460): n is a, c, g, or t
  misc_feature (463)..(467): n is a, c, g, or t
  misc_feature (474)..(482): n is a, c, g, or t
  misc_feature (487)..(503): n is a, c, g, or t
  misc_feature (505)..(506): n is a, c, g, or t
  misc_feature (508)..(518): n is a, c, g, or t
  misc_feature (520)..(534): n is a, c, g, or t
  misc_feature (536)..(541): n is a, c, g, or t
  misc_feature (544)..(560): n is a, c, g, or t
  misc_feature (579)..(605): n is a, c, g, or t
  misc_feature (607)..(628): n is a, c, g, or t
  misc_feature (632)..(639): n is a, c, g, or t
  misc_feature (643)..(649): n is a, c, g, or t
  misc_feature (653)..(661): n is a, c, g, or t
  misc_feature (664)..(671): n is a, c, g, or t
  misc_feature (675)..(675): n is a, c, g, or t
  misc_feature (678)..(696): n is a, c, g, or t
  misc_feature (698)..(700): n is a, c, g, or t
  misc_feature (702)..(702): n is a, c, g, or t
  misc_feature (705)..(708): n is a, c, g, or t
  misc_feature (710)..(712): n is a, c, g, or t
  misc_feature (714)..(719): n is a, c, g, or t
  misc_feature (721)..(730): n is a, c, g, or t
  misc_feature (735)..(745): n is a, c, g, or t
  misc_feature (749)..(761): n is a, c, g, or t
  misc_feature (765)..(771): n is a, c, g, or t
  misc_feature (776)..(777): n is a, c, g, or t
  misc_feature (794)..(802): n is a, c, g, or t
  misc_feature (809)..(814): n is a, c, g, or t
  misc_feature (816)..(818): n is a, c, g, or t
  misc_feature (820)..(821): n is a, c, g, or t
  misc_feature (823)..(826): n is a, c, g, or t
  misc_feature (828)..(833): n is a, c, g, or t
  misc_feature (835)..(840): n is a, c, g, or t
  misc_feature (842)..(851): n is a, c, g, or t
  misc_feature (854)..(863): n is a, c, g, or t
  misc_feature (866)..(871): n is a, c, g, or t
  misc_feature (887)..(899): n is a, c, g, or t
  misc_feature (901)..(904): n is a, c, g, or t
  misc_feature (906)..(909): n is a, c, g, or t
  misc_feature (911)..(921): n is a, c, g, or t
  misc_feature (924)..(951): n is a, c, g, or t
  misc_feature (953)..(955): n is a, c, g, or t
  misc_feature (958)..(963): n is a, c, g, or t
  misc_feature (965)..(965): n is a, c, g, or t
  misc_feature (969)..(972): n is a, c, g, or t
  misc_feature (974)..(976): n is a, c, g, or t
  misc_feature (983)..(989): n is a, c, g, or t
  misc_feature (995)..(997): n is a, c, g, or t
  misc_feature (1004)..(1006): n is a, c, g, or t
  misc_feature (1011)..(1011): n is a, c, g, or t
  misc_feature (1016)..(1016): n is a, c, g, or t
  misc_feature (1018)..(1026): n is a, c, g, or t
  misc_feature (1030)..(1031): n is a, c, g, or t
  misc_feature (1033)..(1033): n is a, c, g, or t
  misc_feature (1035)..(1038): n is a, c, g, or t
  misc_feature (1040)..(1040): n is a, c, g, or t
  misc_feature (1045)..(1049): n is a, c, g, or t
  misc_feature (1053)..(1073): n is a, c, g, or t
  misc_feature (1079)..(1084): n is a, c, g, or t
  misc_feature (1086)..(1086): n is a, c, g, or t
  misc_feature (1099)..(1099): n is a, c, g, or t
  misc_feature (1103)..(1109): n is a, c, g, or t
  misc_feature (1117)..(1117): n is a, c, g, or t
  misc_feature (1119)..(1124): n is a, c, g, or t
  misc_feature (1130)..(1130): n is a, c, g, or t
  misc_feature (1132)..(1134): n is a, c, g, or t
  misc_feature (1136)..(1137): n is a, c, g, or t
  misc_feature (1139)..(1139): n is a, c, g, or t
  misc_feature (1141)..(1147): n is a, c, g, or t
  misc_feature (1149)..(1150): n is a, c, g, or t
  misc_feature (1152)..(1158): n is a, c, g, or t
  misc_feature (1160)..(1163): n is a, c, g, or t
  misc_feature (1171)..(1174): n is a, c, g, or t
  misc_feature (1177)..(1181): n is a, c, g, or t
  misc_feature (1183)..(1194): n is a, c, g, or t
  misc_feature (1198)..(1201): n is a, c, g, or t
  misc_feature (1206)..(1212): n is a, c, g, or t
  misc_feature (1214)..(1214): n is a, c, g, or t
  misc_feature (1228)..(1228): n is a, c, g, or t
  misc_feature (1230)..(1230): n is a, c, g, or t
  misc_feature (1232)..(1244): n is a, c, g, or t
  misc_feature (1247)..(1253): n is a, c, g, or t
  misc_feature (1255)..(1257): n is a, c, g, or t
  misc_feature (1262)..(1262): n is a, c, g, or t
  misc_feature (1265)..(1271): n is a, c, g, or t
  misc_feature (1274)..(1281): n is a, c, g, or t
  misc_feature (1287)..(1299): n is a, c, g, or t
  misc_feature (1301)..(1301): n is a, c, g, or t
  misc_feature (1303)..(1303): n is a, c, g, or t
  misc_feature (1308)..(1308): n is a, c, g, or t
  misc_feature (1310)..(1311): n is a, c, g, or t
  misc_feature (1320)..(1321): n is a, c, g, or t
  misc_feature (1323)..(1325): n is a, c, g, or t
  misc_feature (1327)..(1327): n is a, c, g, or t
  misc_feature (1329)..(1329): n is a, c, g, or t
agagctgtgcctagcaaataaataaccacatagcagcaggagctgctgtggagacaccatgacaaacggcggccatggcaacaactgacctgggtggcacgataccatttcgggagccagcaggcaatgccgccttgtggcctgttcgcgatgtgcagcgtgggctggccggacgcgggcgagcactgagtcagccgcaagaggacaccacgggttcctgggtgccggtgcccgacggcccctctgccccatcctcatctccagcatccaccatgatcgttctttttttctgaagaagttggaactgattggggggggggggggggggggggggggggcgatntnnnnnnncccctcnnnnnnnncnncnnnatggcntngnnncnnnnttagactgatctacaacctcaancnnnnnttncnnnnnnnnnnnnnggggggtaannnnnnnnnnnnnnnnagnnnnntttcttnnnnnnnnntttcnnnnnnnnnnnnnnnnncnngnnnnnnnnnnncnnnnnnnnnnnnnnnannnnnnacnnnnnnnnnnnnnnnnntttgataatatatcccctnnnnnnnnnnnnnnnnnnnnnnnnnnncnnnnnnnnnnnnnnnnnnnnnnctcnnnnnnnntctnnnnnnntctnnnnnnnnncgnnnnnnnnccgnccnnnnnnnnnnnnnnnnnnntnnnancannnntnnngnnnnnncnnnnnnnnnnctccnnnnnnnnnnncctnnnnnnnnnnnnnctcnnnnnnncttcnncctctgattctcccctnnnnnnnnntcgcccnnnnnncnnngnnannnncnnnnnncnnnnnncnnnnnnnnnnccnnnnnnnnnntcnnnnnntcctctctctcctccnnnnnnnnnnnnncnnnncnnnncnnnnnnnnnnnctnnnnnnnnnnnnnnnnnnnnnnnnnnnntnnncannnnnncntccnnnncnnncaccccnnnnnnnccctcnnnccacccnnntcttnctcancnnnnnnnnncctnntncnnnntngtccnnnnnttcnnnnnnnnnnnnnnnnnnnnnttccannnnnncnccactcctctccnctcnnnnnnncccctccncnnnnnntccctncnnncnncncnnnnnnntnntnnnnnnncnnnnctcccctnnnnccnnnnnannnnnnnnnnnncccnnnncatcnnnnnnncnaccccatccccatncncnnnnnnnnnnnnnttnnnnnnntnnncctcnatnnnnnnnctnnnnnnnngcctannnnnnnnnnnnnanantcttncnntccaatccnntnnnantngctt

SEQ ID NO: 4868 - DNA, 573 bp, Zea mays
acatgggttaatgcagtacactcgctccgtcctcgtcatacataacatcgcccaccaggtcgtttccttctcctaatcatgaacctgctgagccattgctattttttcctaacgatattaaaatggttcgatactgatcgtggcacattgatttgtgttggtcaattgtttcttttagatttttctgtcaaacattcatgctcatgcagaagtgaatgtcctgcgtccgttctgacggcttccctcttgtttgcagggccgtggtcctgtagatgaattcccgtacatggacttgcctgaacactaccttcaacatttcgagctgtacgatcccgtcggtggcgagcacgccaacatctttgccgcgggtctgaagatggcagaccgggtggtgactgtcagccgcggctacctgtgggagctgaagacagtggaaggcggctggggcctccacgacatcatccgttctaacgactggaagatcaatggcatcgtgaacggcatcgaccaccaggagtggaaccccaaggtggacgtgcacctgcggtcggacggctacaccaactactccct

SEQ ID NO: 4869 - DNA, 421 bp, Zea mays
gtcgaccctagttttttggtaagacacttgttgtaagggcactcataggggcatgctctcaaggtaacagaagaattgcttattttgctcgaaaaggtgctgattgtttgggtaagtatgttggtgatgctgagagacagttaagacttcttttccaggtagctgaacgatgccagccttctatcatattttttgatgagatagatggtttagcaccttgtagatccagacaacaagaccaaacacataattcagttgtggcaaccttgctctcgttgcttgatggtttgaaatcacgaggctcagtcgtagtgattggggctacaaatcgtcctgatgctattgatcctgcccttaggagaccaggaaggtttgatcgtgagatatactttccactaccaaccttcgaggatagatctgc

SEQ ID NO: 4870 - DNA, 601 bp, Zea mays
tctgccgatggttcaccggttccattatcatctccccctgaccctagggtgcctgattgaaccaattgaaattgatcgtcaacccaagtaggaaactctctgaatgagtttgtacgtggatcgacagctttcttaaactttcctatgcgtatctcatacatgttacgcacatcaatgatgacctgtcacattaatagcgtaaacaattcgcaggcaatggaaaagaagttcaacaatgcaaagatagatgacgagttatgaactatctgagatagatgaaacacttacagtgtctggatcacttatcaagtcattccagtcttttggcttaacatatttcccaacgattttagttggcataacacctgggtctccaaacgtcactatctacaaaatggccaaggagcagactaagctggaccgtttcatcattaaatatccagtgaccaaccaacaagaaccatgcaggcaaactaacctcctttttcaatttgacacggacatgatcccatcggaatggtgcatcttccccagcaccaacaggggagtgactggtatgtccatgatgtatggcctcatcctctggagtaacaggtgactg

SEQ ID NO: 4871 - DNA, 475 bp, Zea mays
ctcgcggacaatggcttcaccggatccataccgccggagctcggtgacctgccggtgctcaactaccttgacctctccggcaacgagcttagcggcgaggtgccgatgcagctggagaacctgaagctgaaccagttcaatgtgtccaacaaccagctgcgtggcccgctgccgccgcagtatgccacggagacgtaccgcagcagcttcttgggcaaccctgggctttgtggagagatcgccggtctatgtgccgactcggaggggggaaggctgtcaagaaggtaccgtggctcaggctttgcctggatgatgcgctccatcttcatgtttgcagctgccatcctggtcgccggagtggcgtggttctactggcggtaccggagcttcagcaaatcgaagctgcgcgtggaccgctcgaaatggacattgacgtctttccacaagctctcattcagcgagtacgagatcctta

SEQ ID NO: 4872 - DNA, 406 bp, Zea mays
atcgcggtgtcgatcttcccaacacacgacgagcacgagtccactcattttgccgaactgggagctgcaggggcgcacggccagtgagcacggtgaagcgacggcagcgcagatcgagctcgcggcgcggcatgacatccatggacgcgagctagatgtcggacatggagatgaaggctcaacggcgcacggcaaggtcaatgacgcgctgtggatatggaggagtctgcaggggttcatggtcggaccggcgactggccgacgaacttgatttggcagtaggcgatggctaggacgtgggggagccgggactacagtgctagccaccagcgagctttgatggcttgccgtagctgagaggagcacgtagctagtagaggtgctgtgtagagaagggagaaactgg

SEQ ID NO: 4873 - DNA, 366 bp, Zea mays
gctactcgttggtcgctagctcgatcgtgtagcagcagtgtggtaacggtgtggtacgtagtagtagtagtacaacggagagaagggatcgcaagggacgggacggacggaccaagttgcacgtcgccgtcgcggtgtttattgcatgcatgcatggggccccggccggttgcagcatgcgctgcttcccatcccagtcccagtcccagcgcgtgggctcccacacgtgccgtgcctgtgcctgtgcctgtgcctgtgcctgtgcctgtgcctgtgcccgacgtcacaagcaaccacctctctctttcttccctcgctgggcagttgcggcgcgggtactctctcttaccctcaggcacacgtaca

SEQ ID NO: 4874 - DNA, 436 bp, Zea mays
ctatagagcaaggtgaggatggcatctctttatcagatgaggataatatggtggaactatatacaagtgatcaactgagagcaaccctggatgatcatgctgcagcaaatcaaaaggtggtggagcaagaaggtgacattgttgaaagggttgtgaccacagatggtatttctattgaagactatgagaaggaagtagagcaatctactggtgacgaatcaaggtcaaccaagggtgtgaactttgtggaagataacgagaatgtggatccagaagatgtgatcaacatacaaggtgtaatcaatgatgacagttgtgtggaggcacaagaggagggcatggtggttgcggagcaaggtggcgatgccatgcatgcaggagatgagggtaatgtggtggagcaatgcaccaatgatcagctgagagcaaacatgaa

SEQ ID NO: 4875 - DNA, 373 bp, Zea mays
gggtcgttggcgtcgtcctccgaagcaggttctgcgtcacgacccagcacaccgcaaccaacagcacacatgcgctccgactctgggctaccagcagcagcaggcaccaccagcgctagctcttcttctccatccacctgagcaagccgtgagctcagcagctcctctgccgacggtctcgcctcaccagtaacaaccaaaggggtcgcaggaggtaacagagcatcgctcaggctcagccgctcacgcccgggtccaaccgccaggggctgccctacgccggcctccgaaacggactgcaccagcacttgctccatgcggcacttgaacagcgaggtggcctcgctcatggagccttcttctccttcttcat

SEQ ID NO: 4876 - DNA, 694 bp, Zea mays
  misc_feature (409)..(412): n is a, c, g, or t
  misc_feature (416)..(417): n is a, c, g, or t
  misc_feature (419)..(419): n is a, c, g, or t
  misc_feature (564)..(568): n is a, c, g, or t
  misc_feature (599)..(603): n is a, c, g, or t
  misc_feature (623)..(627): n is a, c, g, or t
  misc_feature (633)..(639): n is a, c, g, or t
  misc_feature (644)..(649): n is a, c, g, or t
  misc_feature (656)..(667): n is a, c, g, or t
  misc_feature (669)..(672): n is a, c, g, or t
  misc_feature (677)..(679): n is a, c, g, or t
  misc_feature (681)..(683): n is a, c, g, or t
cagctggagccacatcactggaggtgccagcaagcctcacaaggggaatgatcctagatggaaggcaattcatgctgtacgaactcgtgatagcgtgcttggaatgagccattttagactactaaagcgtcttggttgtggtgatattggcagtgtttacctctcagaattaagtggaactcggtgctactttgcaatgaaggtaatggacaaggcatccttggcaagtaggaaaaagttaaatagggctcaaactgaaagggagattctacagcttcttgaccacccattcctcccaacgttgtatacacattttgaaaccgacaggttctcttgtttggtgatggaattctgtccaggtggtgatctgcatactttgcgacagagacaaccaggaaagcatttcatnnnnaccnnanaggagatgctgtcggtttcaaaatgtgtataccacgttgggaggaatgggtggtcaagaagctgtagaatctccctttcagtttgagccctatttaactttttcctacttgccaaggatgccttgtccattaccttcattgcagnnnnnccgagttccaccttaattctgagaggtaaannnnncccatatcaccacacccaannnnncttttnnnnnnntaaannnnnncattcannnnnnnnnnnncnnnncctannncnnnaattgcctttc

SEQ ID NO: 4877 - DNA, 1400 bp, Zea mays
  misc_feature (1335)..(1344): n is a, c, g, or t
acactttgtgtttaactctgtgtgcatcaagatctagatttgtacatataattgtttggccctgttttgtcctacatatatttgaatgttagcagaactgccttgtccctgctcatccaagagaaagcctacttttgggggctggtcaatcagcttccctcattacttttagattacatatgatagtttgtggaatagaagttatttctcataaggatattaaacttgaataatatttgctggttgccactagggagaggataatattgtagtctcatgtgtttgacgtctttagaactaggtctaaagctatctttcctttcctagttttgttcaagttgtgtttgacgtctttagaactaggtctaaagctatatttcctttcctagttttgttcaagtcctgtttggtgagtgtggccctgtttggatatgatctttccgaccacgaggtgtggtagcggtgccgcggccatggagctgcgactgcgatacgtaaaatcaagctccccagtaaaactcgtggtggttaagtcacgtactcacgtgcggtggaaagaatcataggaacctcagaccgtttagtgtgattcttcccgattcttgtggccagccatcggattataatcgtattgaaacaggccctatattttggatgaatattgatgaagtttttactcaagcaagtgttttatgttttgtacatctactctttcgttgatgtcgacaggctctggttggcctagctgaagaggttgctaattttgatgttccgttagggtctaggaagataaacggaaaatatattcaatctcatcttctctccagattagaaggtaagtggcagcagtgagcacgcaatgcttcaggttgaatcattattgcaggttgaatcattattggagaactcggtgacattattatatttgctctcctgcagctgtccatgataagattatggaacaggtaaagagtgttgacgctttaaagacccaagaaattcctgtctactggattggcatggctgaggtaaacatctgttgagttgttatgaggaacaaaaggttatttttgcagcaatatataaatcatttccaacctggcattacactgtcatgtgtctgctctgctattgcctccatggccgctttctctagttcttacatctctgtcgatgtgtgtttccgcatcagaatgtgcagatcatgggttcattcgatggatggtcacagggcgaggcgatgtccatggagtattcaggtgactacggaagattctctgcgactctgaagctaagacatggaaggttagtttttactagtttttacatgctggnnnnnnnnnnttcttcacgtaaataaactcgctgtgtggccccccaaggaaggtacgagatcaagt

SEQ ID NO: 4878 - DNA, 381 bp, Zea mays
ctgccaaatatgatcacatatagctcggtgattgatggactctgtaaggagcacatgctgagtgaggcaatggagatcttggaccggatgcgactacaggggaggaagcctgatgctgggttgtttgggaagctaattgttgggctatgtgatgcaggaagggctgtggaagctgcaaattacctggatgagatggttcttgccggtattgaaccaaaccgggtgacttggagcttgcatgccaggataaacaataccgtgctgacagcattatgtgataagggtgaacttggcagggcttttcaggtctaccagagcacaaggactcgtagtatttctaccgacccaaccactttccatcttcttgttgagagcttctcc

SEQ ID NO: 4879 - DNA, 603 bp, Zea mays
gaaagtttttcccttgagcaacaactctccgcaaaagtgggtatatcccctgagcaggaaactgattgtgcacagcaggaggctattgatttgaaatctaaacttcagtccaaggttcttttactaatcctgttcttttactttgtgtattcgagaccctggtgcagtatacctacgtgtaaaatttggcatactctggaacatggaattattcatggtttgtgctacaccttttatggatttttagttgataggaatagtttgcatgttctttagatggctataagcaactatttgtgttttatgcttgccttgctgacatttaagttaatcaactttgctgatgtactttggaaggaagctgaattcgaaaagctgaaattcgagcatctgaaaattactgaggaacagtgcgacttgatcaatcaaaaccataaattaagtgaggaagctgcatatgcaaaagaattggcatcttcggctgctgttgaactcaagaatttggctgaagaagttacaaagctatctgtactaaatgtgaagcaagcaaaggagttactagttgctcaggagatggcacattcaagggttcatggtagaaag

SEQ ID NO: 4880 - DNA, 1097 bp, Zea mays
  misc_feature (51)..(56): n is a, c, g, or t
  misc_feature (1030)..(1033): n is a, c, g, or t
  misc_feature (1036)..(1036): n is a, c, g, or t
gcatggaaaggtatcgtcctgcaaaattgaataaggaaatctaagattcannnnnntatgtttctccggagcatgcaggttaccaacatacactgcataccaagatcagtaaggttctcatttccatctaatgctccaatcatcttcaagaattccactgcattctcgacctacgtgtttatcaagtgtaagtggaaataattcaaaatcaaaagaaggatcttttgctacctacttaaaaaatgtatatgatgtgcacatgcaacatgctagaaaaaaaaatcggttaatatgacactatatccaacaaagacacaaaggcaatgagaaaaagggaatatggaaatgccaaagtatgatttaaacacatacagctcgtggttctggaggctgtagagcagctgataggaactccccaatgcttccaacttgcaaactttttatctgcagacataatgaattcaaaggagttctaagaagctctggaagctgatagtctgcaaatgcatcatacacacatctagggtacagatggtagcattctccaggttgcacacggccagctctacccctcctctgcattaagacaatggatactatgagaattgccgcgaatcacaaagatggatagatggtactgtaaacaaagtggccaagtgtgataatatatgtgccaagaggttatgttcaaatttggctcgttgggatttctttcaattgttattgttggtcttttctaattgtaaccagtcaatactaaaacagaccaaaaagataccttatgaaaggtttgagagagagagagagagagaagcacatggaagggttaatagagttaaggactaatgcaattaaacaaacataaataaccccagatgtcagctgaataaataggtcttttgacctttggttttgccaatggaacaaagttcttttagtcaggaattgggattataattgaacagaagtctcataattgagtcaaacaaaagatctaccggtgaaagatgaaacaagcaaacagaagctnnnnatnacctgacgggcagaagctttcgaaatccatgaggggagtaagcatggagtatgttagagca

SEQ ID NO: 4881 - DNA, 405 bp, Zea mays
catggatccagacttccaaagttggaatctgatcactcgcgtcagtgcttctcagctcccttgtttgccgttatggaggagcagaactcgtggctcaggaccaagttctccaatactgtctatgctagggtggatccccggagagtacctgttgctccgcttagcaaggatgttgagcggaaactgcacaaattcttcaagatgaagaagactgtatcgatgcctgttgatcgggatgatggagacacagggactgcattcaagcactgtgctagcttgccgctagttcgatcccagcctcagcttgacagggaaaaggtcaacaagcccgagagggcgagcctggagattccttcaagctcccagatgaactcagagagttgcaagattttttttttttttttt

SEQ ID NO: 4882 - DNA, 456 bp, Zea mays
cgggctgatggcggtggcgctggtgctcctgggcacctggccggttgtcctggcggtgctggagcgccggggccggctgccgcagcacacgttccttgacttctccgccaccaactttatggccgccgtgctgatcgccctcaccttcggccagatcggccccgccaacagcacgcccaacttcctgacgcagctcactcaggtagttttcatttcagttctgtctgcctacccccgtcctgtcgtcaccaacaaccaagcaaggacatcttatcttattattagttcaagaacaactgggcttcggtcttgtttgccatggcgggcggcgtcaccctgagcctgggcacattggccacgcagtacggctgggcgttcgtcgggctctccgtcactgaagtcatggcctctagcctcaaggtcgtcatagggacaacggtcaactatttcctggac

SEQ ID NO: 4883 - DNA, 669 bp, Zea mays
tcctccgaccattctgctcgcccgacaacttgtcacaactgggtctgctccatcggctcctcgtccggctttaacatcaccgtggccagcagccacttcaaattcgtgagcgcccaacgccgccccctggttcactccctccgtacgcacatcgcccttgtccccggtccatgtagcgtgtctctacgctctgcgtcgtcctcgccgtcattatttttggagttcgtcgtaacgcgctgccgatggtctgcgtatagcgggagatcttcgcaagtttacgcagctttgtggtaattaattttgatggcgatctacgttacttagcgctatgtttgttttctttatgtgtttgtgtgtaggttcattccctacggggcatcacagtttgcgctaagcacgattgattccatctagttcacttgcactccaggtgtttgatgaatcatctgaaccgggactcgttgtcgtttccacgacttctgagtcaatttagtattagtgagccggtttgttaattctctagctagtttgatgtatgaatgtgttcgatatatttattggtttagtatattaattgcgatagtttttgtgtcatggtgcagatgtgtcgtgattgtattagatgtttgctaatgtctcatatatgagatgtatgttcgaattggtgac

SEQ ID NO: 4884 - DNA, 900 bp, Zea mays
  misc_feature (842)..(844): n is a, c, g, or t
  misc_feature (848)..(848): n is a, c, g, or t
atgtttacacagctacaacagggtgcctagcctggggtaacgaactaattgacatgcatgagttgcaaacaggggcatatactctaaacctgaagcttcctgcttctgaattgcgtaagtaatgtcgattatctcaaaaaagtgtcactcagttcacgtttctgtatttaccacctgtaaaacattatgtttatgccagttcctgatgtctcttgatgagcaggaggacatcacccaatttggaaaatagccacgataatatcagccatagtgttatttgttttggctgcttgccttcttctgtggtggaagcatggtagaaatattaaaggtaagattccactgtacacatcattcatgttatttatcgctcacaagtgttcaagtgactgtggtttgggcttttggcaatagttgtgattatactgcgtttcgtcggcttggtttttactaatactattagaaacattagtgatttcaaaaaacaaactagtgtttaaggtttggagtgaacccatctttttcatggtttttaaataaccataatgattccatgaattttgttatgtgggaaaacattgcagacatgaggtattctctagccaaggtcacataaatcataaatttttacttataagttcattgaaactatcctccaatgattgagtgataaaagttttactcatcaccataatgatcgctaaagaaaggtgtgaatagacagttcaatgtgaattcttagaacagcagtatttataatgttaattaccattctgaagcagatgcagtgcacggaagttggagatcaaggcattcgtctacccaatcccagcagaatagtnnnatgntggacatctcgcagtcaattcgttttgatgatgatgtggaggatggaaaaag

SEQ ID NO: 4885 - DNA, 375 bp, Zea mays
aggctcgccagcaagctggcagccgtaagccaccgagcggaggcgaagagggaggccgcggaggcgaggcggaaccaggaagccgcgaggacggaggagcaggcggcccggatccgatacaccgggcatacgccttcgtccttctcctgctggtgctggtgcccgtgattttgacggatcttttccgccaagtcacccagcatggacagtggtagaaaaattccaacggttctttctttccccatgcatgaacatggagaaggaaaccttcccgttatcgcgtcgtcgtcactcacgcggttgcatggagtggactggccactggggtagtagggtggcgccacctgtcctcgtccaccttccacccctctcgcc

SEQ ID NO: 4886 - DNA, 655 bp, Zea mays
tctcctgatcagatcagatgtgaatgtacagtgcgtaaccctggactatatatgtgaatttgcaggggtgctcacaggctgcggaaagcagaagatcggcgcggccgttaatctcggagcgttctacttgctaggcatcccagtggctgtactgcttgcattcgtcttccatctcaacggaatggtactgcaatgacacctctgctaacttgcacatagttttttggtactgcaatgatacctctgctaactctggaaacactaccactgttctgttctctcgccagggcctctggcttggcatcgtctgcggcagcgccaccaagctggggtttcttctgtttgtaacgtgttccgtagactgggacaaggaggtaagtagaaggcatattcagtttctctctctctctctctctcttggttcactccagagtatgggctagtcaatgtgatatgtatatccttttttttaatttgtcctctcatatttcaggcagtgaaggcaaggtacagagtgttagggtcatctctcccgttagcatgaaaaaaatgccagtgttacatggaaatcccatttgaaggcagttgaacagaacccggcaaagaaagcgtgggaaaaaaactttctatagttggggacatctcaaaatcatag

SEQ ID NO: 4887 - DNA, 361 bp, Zea mays
cgttgaattctgcccggcgcgcgggggcttgcgggtgcgcaccggaggctgcatcttttcccggccaagattcggtccggtggggccgttcttggcacgatttcacgggccgtttggccttccctcgccggatttgttcggttccaggcaccaaattccaatcttttcctgctgctgctgcctctgcgacactttattcttctcccccaattagcggcggttagtgtggattctgatttgtaggttcctttcctggtttcctccgtgagcttctgcggttggcgtggttacgccagtccctcgcgatttacatctgtgattcgtttgaaaatctgggagtgtggagatttgggaggtcttc

SEQ ID NO: 4888 - DNA, 505 bp, Zea mays
ttctgcatctgtcagattttttgaaccaatgactaaggtccgtaaaccctctgatgaataggctgacaaatgatcttctgtagcttctctaattttaacatgcaacgaatcataaagttcatcatcaatttctactttcaaaatgtttaacattgatgtgtcagcacctttcacaagaaccttcacattgttgtccggaaaccttacaataacagacattctttttctcacactatcgaattcatggagaccaagaacatccaacctgattatgacaatgtaagattggtaagtaaatatacactctaaaaatataggtgcaaaatgaattcgttggaactgataccagcattggctacagctttgtcaaggaactcagagggtttcagggttgcagtatttaccttaacctctcgcctagaacatctataacaatgtgtccagttgttctttcaacaagggtatacccataagcagacgctgcaattactaaagcctgctcata

SEQ ID NO: 4889 - DNA, 450 bp, Zea mays
gatcaaccagagggaagatttctcattcgcgcttttctcaggtggtctctcaaaggtaattctgaaagaaaaaaaagacagtaccttttagactcgtctgcttttcccatctgatgaacaaaaaacaaaacactcctgtaccagcccaagctgatttctgtctccaacaaggtagcctttgctaatccaaaggcaccagtgtacccgcgtttggcgcaagggaagtcttggaatgaagtaagccttcttgccattcgacaaaaagatcgtaggagtagtattctgctctgaactcaactttgtatcagaacgggagaagatcgcattgtggagataacttaactgtagacgaccagtagtcaccaatctaagaatggcgactatattattattgttttttttcgtagatgacagtcacctggacaagcggctacgatattacaaaagcag

SEQ ID NO: 4890 - DNA, 459 bp, Zea mays
cacagatctccaaaaactttgtggcctcaaatcaattggagtagtgaattcccactcccttatctgttatcttctttcttgccagggtttggtgcaggatcctcgcgttccagggcagctgttgccagggctgctccagcaatcaacaattctcagactcttgataatgctcctccacatcctgctgatggagatgcccctccacatgctgccgatggaggtgctcctccacatgctgcagatggagatgctcctccaatgaacaatgaagaaattgcaaaccaagatgaaattatgattggtgaagtagctgtagatgatgaagatgaagacgcaaactctcatccagttccagccagggatgcgtcgatggaaagtgagcttgccaatgaactgaagggggatgccttggatgactacgatattgatgtcagtaacgaaggacaggctatcgcagag

SEQ ID NO: 4891 - DNA, 454 bp, Zea mays
  misc_feature (396)..(397): n is a, c, g, or t
  misc_feature (434)..(442): n is a, c, g, or t
  misc_feature (447)..(447): n is a, c, g, or t
tacttctggatgaaaccatgacgtccaaggtgtccgacttcggagcttccagatacatccccatggataggacagggctgacgacaatggttcagggaacgattggatacctggacccgatgtacttctacacgggacgcctcacggagaaaagtgacgtgtatagctttggcgtcattctcgtggaactgctaacaaggaagaagccgttctcgtacttcttcctcgacggagatggcctcgtctcactttttgtcaacctgcttgctaaagaaaatctggcccaaatactcgatccccaagtcgtagacgagggaggcaaagaagtcgtccatcaagtctccatgcttgcggccgcatgtataaagctaaacgctgaggaccgatttttttttnntcttgtttttgatctgaagggggatgcctaggatgannnnnnnnngggtntcattaa

SEQ ID NO: 4892 - DNA, 392 bp, Zea mays
tcgcttcgtcggcaccgtcccgccgggtctcggttcactgacgaggcttcagacgctgtggttggcggccaaccggttcgtcccggccgagttgccggcgtcgttcaagaacctcaccagcatagtcagcctctgggcatcacagtgcaacctcaccggcggcttcccgagctatgcgctggagatggaggagctggaggtgctggacctgtccaataacatgttgaccggaagcatacctgcgggtgtttggagcctgaagaacttgcagcaattgtttttgtacgacaacaacttctccggcgacgtggtgattaatgacttcgccgcgacgagcttgacgcacatcgacctttcagagaattataaacttacaggacccatccctgaag

SEQ ID NO: 4893 - DNA, 491 bp, Zea mays
ttacattcaggtttgctttactgcctgcaggatgcgttcggatggtttatgctctcgaataaaaaaaacagaggccttggagaatgtactgcatatacggtatcgccagtcttttttagacattttagttgcgccttggtacagttgtacatagtacatgtgcgtcgagcttcaaaattctggtttccattattgcagagcactgttgttccgtgtttcaggcgtagaacagctaaaaaccgggcatacagagagcctgcaagaataacagtgaccctcttggccttggagcatgcggagaatagcttgaccccggtcactggaaactgcgccgtctgcccccaccgcgcgaatcattgtacgtcgtcgtcctgattccgtcgacaggaacaggcgggtgatcgcttgtgaatgttgtttctgctcttgatgacatgggtgccgctcgctctctgccgtgcgtgaggggaagctgcgacataagcctagtt

SEQ ID NO: 4894 - DNA, 470 bp, Zea mays
cgaagatcctggagtgaagagcgaatcttgttccggctcgtcaccagaggctaagagcggcagtctggatgactgggaaatcagaaggtgtggggctatggctgcaaggcttctgaaggatgtgaaactgtaaacatgaatcctagagatcgtttcccccccttggcagagaactctagagctcctttatgttgttgtccttgatagttgttgtactgcccatggcagtctatgttattgtatcttattgcatcagtggatattgataccattccaaaagaaaaaggaagtctctctatctctctctctgatagatgtcaggacagcacggctaatgagtcaggtaacgagttcaattgttctgaaactggctgctctagttgtcttatatataaaaacaaattttgtggttacagataagaggggctcttgcttgcaccggcgcctggcggtagaaacaaggtaaatga

SEQ ID NO: 4895 - DNA, 529 bp, Zea mays
caaggcaagcagcagagggaggccaagtgactgagctccgtacgtgtctccttcctccaggttcctctctgggctgccatggatttgctcagcagaggggcggcggtgttgaaggccctggtgttcctctgcttcatcagatcgtctcaaggtatatatatatatatatattccgacttggacattactggatcatctatatatccagtttttttttcttttcttagtcctcaagtggcacatatatacatcacacaagctgctgaatttgcaggaggagatctgaatctccctcccttggtgaaggcaagcaggttccccaggttccaaagcgaggcatacgactacatcattgtcggcggcggcacggccgggtgcccgctggcggccacgctgtcccacaagtacaaggttctcctgctggagcgaggtgggtctccatacggcaaccgcaacatcacgttgctggagaacttccacatttgcctggccgacgtttcaccgcagtcaccgtcacaagctttcatct

SEQ ID NO: 4896 - DNA, 406 bp, Zea mays
aatgttctctaatgcccaagacaccgggaaagtggtggaggagctgaagaaggcgacggaggacgagatgtgcaagcccgcgcttgccgatgatgatgttgtcgccacacaggtccagggagagaactcgctcttagagtgaagcacggagcgttaggctcttcggctggctatgggcacggtgtgtgcccacctctctcctctgacaccgatcatggttcgtctgatcaattggctgcatgcgatgccctgccacgtggagcgcgtcgtcatcgaaggtgcgttccactggagcagcatggccattgggcagatggtctccaacttcgatgagattgatgccactgtgatcgtggagggctttgctgctggccatagcgatgaggagttggatgacattgaagaa

SEQ ID NO: 4897 - DNA, 364 bp, Zea mays
cgtggtgttcggcggggtccgaatcgtcgagacgctcgaggccgtgccggaggaagaggtgcggaggatgcggcagcgcgtgctggaggtggcgccgagggtggtgtaccggcggcacgggagcacgcccgagctgagagaggccgtgaaggatgccgtcgacctcgctgtggatggcgtgctgcagaggattcggtggcggacgcgtgcactggaggacggaccgccggagaggatttacgcgcaagaggaggacagcgtcgacagatagaggatgaggaccattcccttcggctgcaacaggacatccacatccaatagtgaaatacagtgtgtacatgttgctgttgtagtggagaaatga

SEQ ID NO: 4898 - DNA, 1254 bp, Zea mays
  misc_feature (60)..(60): n is a, c, g, or t
  misc_feature (199)..(199): n is a, c, g, or t
  misc_feature (304)..(304): n is a, c, g, or t
  misc_feature (324)..(326): n is a, c, g, or t
  misc_feature (333)..(335): n is a, c, g, or t
  misc_feature (342)..(342): n is a, c, g, or t
  misc_feature (380)..(383): n is a, c, g, or t
  misc_feature (411)..(417): n is a, c, g, or t
  misc_feature (426)..(438): n is a, c, g, or t
  misc_feature (458)..(458): n is a, c, g, or t
  misc_feature (1166)..(1172): n is a, c, g, or t
  misc_feature (1203)..(1215): n is a, c, g, or t
tgtttgattctggcgctgagtttattttggggttctgggtgtgatttggcgggggtaccngatatcaatggcgatgcgctgcacgcgagcctggggctgcctcccgcgctcgccgtcaacacagcgcgtgtcgggaagctccagatcacggtaagtaagatgtcgccactctcccgctcgtagctctctgtattttagntgccttgctgtttttccacacgaggagtcggggattatgggccgcattggtggcagattcttgcccatgttgcagtcgatttgctaacgtttgatatgttccggngaattttgttttactctagnnncacttcnnnggcagtncaagcagtaattgcgttagacttgtgactgactgtcgnnnngatggattatcatctcatctaagcaaannnnnnntgtatattnnnnnnnnnnnnnatgtgatggttctacaaagntattctttgtatttagttctgcatccatgttacatttgctgcacttgtgttaatttttgacctgtttttaaaatcatggaatggaatttacagttagaaatgaggtgtttagtattttttctagtttggatgttttacagttatgtagtggccagggggtcgcctcggctagattttgacacttggtgctcaatttgcaatccttaggcctcacagtgtggttaataaccttgcttttgttagttttggtaacggatttcttctgttcaccactgcagttaccatctctatcaaatgtgcaagtagagccaattgaggtgaacattgacaagctcgatctcgtgcttgtagagaaggacgattctgaaaatctttccagccctagcaggtgcatttcatgtctttatgttgcgatttaaaactaccgtgtgagcattctgtaatcgtacttctatctattacctttttagcactgcatcatctccatcagcaactaagagcagtggatatggttacgctgacaaggtatgtttccttgcgctaaatgtttagcacacacgctttccacatatttatgcatgtacaatgtcctgatgcttgctctgtgataactgattactggaatgccagctccatgatagctgaaattcaacttacccgttttctctgtgattatacctcttctctgatattctgccattttactannnnnnntgttttagactatatagatactttgagtaannnnnnnnnnnnnagaactgaacttaaccttatatgtcgggcttagatgcag

SEQ ID NO: 4899 - DNA, 433 bp, Zea mays
gtcatacgaatgcatatggagcaagctgctgcaaggtttgatgcagagtgttgtgtgcttcgaatggctcggcatcgcaacctgataaggatactgaacacctgttccaacctggacttcagagcgctggtgctccagtacatgcccaacgggagcttagaggagctcttgcgctccgacggaggaagaggaatgcgactagggttcgttgagaggctggacatcgtgctagatgtgtccatggcaatggagtatctgcaccacgagcactgcgaggtggtcctacactgcgacttgaagcctagcaacgtgctgtttgatgaggacatgaccgcgcatgtggcggattttggcattgcgaggatcttgcttgatgatgagaactccatgatctccgcgagcatgcctggaacaattggatacatggcaccag

SEQ ID NO: 4900 - DNA, 701 bp, Zea mays
cttgtagccgtcgtccagcacatccacgtcgctccttgtctggaagcagaacctcggttccctcatcttcctcctcaccttcatccgtcctcctttctcccccgctgctgccgccgccgggcccttccacctgcgtgctcagctcatcatatcaacagatgtagatgtgttcccaatcagatcatcagcgcgaacgaacgagccccgcgccgcgcactagaaaccctaacaatcggtcaaccacactacgtactccactattgctcccagcaactcccaagcgcgcaagaagcaacaagtgagttatggtgtgaggccataatcgtcatacgtacgtaccaattgcaggaacttgggctgttgcatgcggtggcggcggtactagcgatctcgccggtggctttcgccgccgccgagctggtgcccgcctgcgaaaaccaagattacaaggatcaaggagagcatcccaccaggaccaggtggtatggtcttctcgcagcaggacgggatggagtcgtcggctcgtcgctagcttcatttacctcgccggcatcgagcgccccggagccggtggtggtagtcttctcgcagacggcggcgacggcggcggaggggcagaaagggatgccgggaagaagcagcgggtacaggaggccgctgtggtggtggtggtccgaagagagcatcaggccaatgattat

SEQ ID NO: 4901 - DNA, 396 bp, Zea mays
gggtggcaggcaaatgagttggcacggaaaatgtatgtggcggggatcaaaccagatgagatcacatacaatctaattatcaagggtttcttcatgatgggtgagcatgagatggccaagacggtctttggcgcgatgcacgggaggggatgcaagccaaacagtaaggtttaccagacaatggtccattacctctgtgagagaagggactttgatttggcattcaggttgtgcaaggatagcatggagaaaaattggtttccgagtgtcgatactattaaccaactgttgaaaggcctcatggctatctcaaaggataggaatgggaaagagataatgaagttggttactgggagaaaaccttcgtattcagatggtgaaatgagggtcttcaaa

SEQ ID NO: 4902 - DNA, 825 bp, Zea mays
  misc_feature (771)..(782): n is a, c, g, or t
  misc_feature (803)..(809): n is a, c, g, or t
aggtgccttccgtgaactgaggattttaagcaatgagagatgaagagattaaccataattgaaatgagataagactaagatcctgacatgaaaaaagaacaagaggtatgatgattgacgttatcatatgggagtgaaaacgagtacattcaaatcctagctcattttccataacaaacaaaaactgacaaatcccaccctttcttcccttacaagcatctcatgataaaggaaaagtggattttgtaataaacccttcacaacttacagaacaagtgtactttcaatgatatgagtgtaaaacaatcctaaatctgaaagcgctcccaaggaattgcacaacatccaacgcaatttggtgtcttgatttgcagatctgttcaccgctatctcattggtttgccaacttcgcctcaaatgaaccctcatggcatgtttcatcacaagcttaaaaagaaacagggcttacttgctccacttcatcaatgaactatggttcatctcttcagactacaggctaatataatgtaaacgaaggcaacctagaaaaataattacctgtaagtctttgttcagtggctcggtgtacatgcctcctgatgcaactgtgatgacacgagcatttggtgccgctttctccaatgacggcataactagctctgttaaagtgtatgttgcagctacattgacagcaaaattgagctccaacctgttcccaaaaaaaagaaaagaaaagagcatggatatgattttagtgataaaactattcannnnnnnnnnnngtaattggctgtttgcaaacnnnnnnnatcacttacccttctg

SEQ ID NO: 4903 - DNA, 462 bp, Zea mays
  misc_feature (385)..(396): n is a, c, g, or t
  misc_feature (404)..(458): n is a, c, g, or t
aagctgtacaaaccagcgaagaccaggatttggaaaattttgttatcagtgacaaatcacagctcttacaacttagagaaaaatatagcatccagtgtctacagattttgggagagtatgttgaagctttgggtcctgttctccatgaaaaaggtgttgatgtttgcctcacattattgcaaatgagcatgaaagaccaggagggatgtgaccactttgctcaactccctgatgttcttaaattaatttgtgcattggctgcccatcgaaaatttgctgcactctttgttgatcgtggtggtatacagaagatcctctctattcctagaattacccagacatatatgggtctttctgcctgcttattcactttcgggtctcttcnnnnnnnnnnnntgtgcttnnnnnnnnnnnnnnnnnnnnnnnnnnnnnnnnnnnnnnnnnnnnnnnnnnnnnnnctct

SEQ ID NO: 4904 - DNA, 731 bp, Zea mays
aggtggcctgatacacttaggagctttaaggttgatggaaccacttatgatccgactgatgggaagatacacgattggccaagcttgagcatggatgaaaatctccagatgatcggaaagatagctgcggtttgcaatgatgcaagcattgcccactctgagcatcagtacgttgctactgggatgcccacagaagctgctctgaaggtacgatttgttcatgtgataaaaattcctttcatctgggatgctgttatagttaagttgttttttctactgatgtagcttggaagcaggtaatgtatacctgcaaaaagttaataaaaaatatataaaaaagaaaagatgataaaagaactggtagttactttcagtgacctctacaattaaaaagattgagcacaactctttcctcaagatacctgaaattgatgaatttacattctcgtgtgcctgttctacttgtggtaggttttggttgagaaaatggggcttcctggtggttatactccatctcttgattcatctgatttgctaagtatgtattcctttccaccttgtaaaatgttttccgtacaaatcgccaaaggttttgtaataattttatttatttttagggtgttgtcagtggtggaataatgctgccaagagagtagcaactctggaatttgatcgcaccagaaagtcaatgggagttattgtgaaagcaaactctgggaagaacttgctgc

SEQ ID NO: 4905 - DNA, 654 bp, Zea mays
  misc_feature (353)..(401): n is a, c, g, or t
  misc_feature (405)..(408): n is a, c, g, or t
  misc_feature (413)..(438): n is a, c, g, or t
  misc_feature (445)..(445): n is a, c, g, or t
  misc_feature (453)..(457): n is a, c, g, or t
  misc_feature (459)..(461): n is a, c, g, or t
  misc_feature (469)..(473): n is a, c, g, or t
  misc_feature (480)..(484): n is a, c, g, or t
  misc_feature (489)..(495): n is a, c, g, or t
  misc_feature (504)..(508): n is a, c, g, or t
  misc_feature (513)..(518): n is a, c, g, or t
  misc_feature (533)..(535): n is a, c, g, or t
  misc_feature (548)..(554): n is a, c, g, or t
  misc_feature (558)..(562): n is a, c, g, or t
  misc_feature (565)..(585): n is a, c, g, or t
  misc_feature (591)..(631): n is a, c, g, or t
gggtgaaagacgtcgcggatggggctgcgcaaaaacagcaaacacccggcgagcgtcgacggcgtgctgttcactgcgcagcacaaagcagcgacgaagccaggggagtgacggggctgcagtttttggaccggcattgctgcgcagagacttggacgccacggctgcagcccgagcaggggctccttgctgccgcaccagggaaaagaaggaaggggcgagcaacagcaggggaggaaagccggctgggaggaagatgaacagggaggcgctggaaaaaaaaattctgggcgccatccatagaaggggagctcggcgtgtgctgcgggagatggtcggctagagcagagggnnnnnnnnnnnnnnnnnnnnnnnnnnnnnnnnnnnnnnnnnnnnnnnnncgtnnnntttgnnnnnnnnnnnnnnnnnnnnnnnnnntcatttnagtttggnnnnntnnngacaatgnnnnnaccacgnnnnntcccnnnnnnnttccctgannnnngccannnnnnaagtctggacttggnnnaaggtttttgcannnnnnntgcnnnnnatnnnnnnnnnnnnnnnnnnnnnggatannnnnnnnnnnnnnnnnnnnnnnnnnnnnnnnnnnnnnnnntgaattaagcttacctgttgagt

SEQ ID NO: 4906 - DNA, 771 bp, Zea mays
  misc_feature (692)..(700): n is a, c, g, or t
  misc_feature (704)..(708): n is a, c, g, or t
gctgcttctcgtctgtttgcctctagaaatggattgctcccattgccgttgcggcgttgttcattgagatattcagctttcattgattcaacatattgatgaagattttccacctgaaaaatagcaaagataaggaaaccccttagtatgaaggcgatactaagcttattagcttagtagtaaatgataacaaataatggcttctcattttgttcacagcaacgttgcaacttctaaatgttaaatcagttaagggttttatatttgactcatcataagaaagcaataattgttagacatggcacatcatcaaagtatatttcatagcaaaaattatcctgaatttatttatttatataacctcttttttgagcaagcttaccttagaagcaacatagatgaagtaatcatgcacatttgacataacttttggaagagaatctagagaatctgatgatattttatttgtctcaatttgaaccagctgctctagctccccaatccacttgcaacactccgcaagatagcactcaaacctattgacagtgtgctgcataaaaatggaagggcgctttgggactccactgtagaaatctaacactggctgattgggtggagcaccagcagaaggatttgaagaaccaccatttgcaactccagcacctgtacgggtgaatcttggcctcaacatnnnnnnnnncctnnnnnagatagcactcaaacttgttgacagtgcgctgcataaaaatggaaggacgctttgggactcca

SEQ ID NO: 4907 - DNA, 995 bp, Zea mays
  misc_feature (961)..(968): n is a, c, g, or t
ccttttattaatcagggatcttcgaaatacaggttgctggtggtgacggtacagcaagttggctgcttggagtagttagtgacctgaaactatcacatccacctcctgttgctaccgtacctcttgggactggaaacaacctccctttttcatttggatgggtaagttaacaccttttgcttattttgagcacaccgaattcttaattatgattaatattctacctctatgtgttttatatgtctagaaaattttatgtttttggtgcaaatggagaatgtagggtagagtaaaaaaaatgattgttagacaaacatgataaaactataaaagtttgccacgagaaacacactatatttattagtgcatgctaacaaaaatgttatgactgagcatcagtctcagttaaaaaaacataattttttgttttaatatagaaaactagaagacttgttattaaatttgtataaatgtataatgttgtttatatgtaatttttccagttaaaattgcaatgttctttagcagttaggggcttgtaccaagttttacaattaaaaaaaacaatattctattttaatctgactgcagggaaagaagaatcccgctactgaccaggcagcagtgaaatcattcctggatcaagtaaaaggagcaagagaaatgaatatcgataggtactgtcttgcttacaaaggataaaagataatgttttgtcatgcactgcatgagctcatccatccatctcatatgatgaagtgttttatgctcttttccaattattgttttacttaacaacattagaacatatccttatgttcagggtacgaaagaaaacactcaattcagcttctagttgtatttttctgtttcagctggcatatcatcatgaggatgcgaattccacaggaaggcccatgtgatcctattgctcccttagatcttccacattcgttgcatnnnnnnnnccgcgtatcagcttgtgactctctcaa

SEQ ID NO: 4908 - DNA, 601 bp, Zea mays
gtcgctgctagtgcaacaagcgccagcttaccaagtgcctcttcccagataacatcaatgtaacccaggcttgagaagtagagcatcatcctgcaatggaaatgtttcagtacataagtagggaaagaaaaaaaaactctcaacgcaaatgagacaataacctacatcgcggacagcaggaaaccagaaatgaacatcgagatgctcccggcccagctcttcttccgattgaatggcagcttcgctgagccatacctcctcccaacaatgtcagcgaaacctgcaagttatatggcacaaacaatcaaatgcaacggcgttctataaaacgacatcgtgctattagatactggggacgggagtaccatcgccaccgctcatcatcgacaaggagacgatcccgatgggggactcacgccagaagactaaaacgctgaacagcagcaccaggacataatagagtggacctctcagcaattccctgtaaagaagcaaagtcgttatcgtcagagcagcaagctaaacgatcatacggatcttcagttcatcggatttactctggttttccttcacgtgtcactgattttaccagagcttcatc

SEQ ID NO: 4909 - DNA, 695 bp, Zea mays
agtagttgctgctgcctgcttgtttgtagctagattcacaatccacccaaagactcgtccttgggtaaagacaacatggcttttattgccaactgcaccctcccttcccgaaaagtaccattctagtaaatatgagtctagataaacgattaaccagattcttagctagaatgggacattattttgggatagagggtgtatctaaggtgtagggttttctgatatcagtgtgtatagttctcttttctgactttattgtttacaattttgcagaacttgacacttgaacaaaacacggggtataaagtctttgatctgcagaaatccatttatgtcatacatgaactgcagttgacaataaggtgcccagatcaggaagccaccaggaagaagtacaaggaccccaaggtacatccaccgttttgttgctctaacgtacattttgtgttttgttaaaatctgtttgcctgatcatttcagtttgggtgcgtgtcgacaatggtttcaccacgagaaatccctacatctttccctgaagattgccataagtgaagtctggacttggagaaaggtttttgcagtaatgctgctggcgatgtagaaaatagcttgattgtaggatagttggtataatacgtgctagttcacattagaatagtaagactgaattaagcttacctgttgagtctgagatc

SEQ ID NO: 4910 - DNA, 303 bp, Zea mays
tcgactgggagctgcctgccggcgcgcggcttgagctggacgagaagttcgcgatcgtcatgaagaaggccacgccgctggtggccgtgccgacgccgcggctgtccaagcctgagctctactactccgcctagtccaccactggcaccacatccatccactgggctgggccattcggcagaggaggaaatgtaacatatttggcccacctgccctccctcgtgaatacgttacatactgaacagtgttgttttaatcgaaagctccatagattgttacctcctacataggacaaatctgcca

SEQ ID NO: 4911 - DNA, 348 bp, Zea mays
acgcagaagcgggcgcagaggcagacgcatgcatgatgcatcgagcccccccagctcgcagtcgcaccggaggaatgctaactggagagccacgcctgccgcggaggaccgggactaactacgagctgccgcggccgttcctggtgcaggtgggacccacctcgcttcctttcctccttccagattatttaaagccatttccgttgcgtccaccatgtccagggtagagagagagagggatggtgtgagggagggaagggagcaaaggcaaagcagccaacgaccagagagacacggaggctgagagagagagagagagagagatttgggaatcgagaaagcagcgag

SEQ ID NO: 4912 - DNA, 673 bp, Zea mays
  misc_feature (404)..(404): n is a, c, g, or t
  misc_feature (612)..(641): n is a, c, g, or t
  misc_feature (646)..(669): n is a, c, g, or t
tatgcaatattgtacacacttctgaccatagagcagtactcactgattgagtgggttcacgagaaaatgatccttgaggggtactcacctgatgtcttgacatacaatgtggtgttgcgtgcaaagtatatgcttgggaagttggatcaattccatcaattacttgatgagatgggaaaaaatgggcttacgccggacctccatacttacaacctgttgcttcatgtacttggtaagggagacaaacccctcgcagctctcaatttgctgaactatatgagtgatgtcggatgtaggccaaatgtgctccatttcacaaatttgatagatggtcttggccgtgctggcaacctagaagcctgcaggtatttctttgatgagatgatgaagaaagggtgtgacangcctctcaacattgttaattatgtaaatgttttggtttatacatgcttgcagaaaggtccgtcacaagaatgtagtgcagtttatcggtgcatgcacaagacaaccaacactgtatattgtaacaggtacactacaatgaaattcatctctgcaatagaaatgtcaataaatttctgtggcgtctaatccccgtaccttttttttttnnnnnnnnnnnnnnnnnnnnnnnnnnnnnnggggnnnnnnnnnnnnnnnnnnnnnnnnaaaa

SEQ ID NO: 4913 - DNA, 711 bp, Zea mays
  misc_feature (604)..(606): n is a, c, g, or t
  misc_feature (684)..(698): n is a, c, g, or t
tttgggaacttgaccttaagctgctcaagtttggaagcaaagttgcttccggatcaaatggtgacctgtaagtttaaacttttcttagtcaataacatggaactgggaactttctgagcttcgtctgatctctgatgcttgcttaggtaccgtggaacatactgcaatcaggatgtggccatcaaagtagtgaggcctgagcgcatcagtgcagatatgtaccgagattttgcacaagaagtgtacatcatgaggttcgtttgaattttttactgacatgagctttccgaagacagttgcatctcccagttatgattaatttcactaatattggagacgccaaatcctaccatcctagtgtaggttctaacagttcataaatgcctctcaacattgttaattatgtaaatgttttggtttatacatgcttgcagaaaggtccgtcacaagaatgtagtgcagtttatcggtgcatgcacaagacaaccaacactgtatattgtaacaggtacactacaatgaaattcatctctgcaatagaaatgtcaataaatttctgtggcgtctaatccccgtacctttttttttgcatgtccttgtcttnnntttcatgtcaggagggagtgtctatgattacctccataaaaataataatgctttcaagcttcctgaaatactgaaagnnnnnnnnnnnnnnnctaaaggaatgaa

SEQ ID NO: 4914 - DNA, 378 bp, Zea mays
tgctgttcaccgccgagttccgcctgccctgcgcgctttcctcagagaggaagcgtgcgcgtgtcgaccagctcggcctcttctacgccgctaacaccatcatcggcaatgggggccaccacggcacgtcctcggcagcggcggcctgtacgcggtgtgtgctggtgatgcaagtggcggcgtgggcgtgggcgtgggcggcctgtacgaggtcgtgtacaacaacgtctttagtctatgcgtcaaggcgattgggtggaggcccgagtggaggttcaagtggaagcccctcgacgacatcgacggggagaagaggagcgcccacttccctatggtcctggtccagatgcccatgtataacgagctggaggtgcataa

SEQ ID NO: 4915 - DNA, 374 bp, Zea mays
caaaagcacaagtgcaaccaattttttttggttagaatcttgcagtttgaaaggctggtgaagtaattcgcaatgctaagatgaattttctttttatgtgcagaaaccctgccgctggtttccctgctttggctggtgagcatcgtctgcctgttcctgatgcccgttctgcccaaccgaagtccagctgctccaagcagcggcggaagagacctcgtgatggcagccggaaagacaagcagtgagaccccagagatactggaactcatcctccatggaaggcgttgcaagagcacgagggcgaagattaagctatgtattttaccatttcatgcaggagctgcttgctagtagttgctaggctttgagcctct

SEQ ID NO: 4916 - DNA, 368 bp, Zea mays
agcttccgaacacttcgtgagtttgtagctaagaggttcccatcatccaaggcagtgttgattaaatataaggatgctgatggtgatctagttaccatcacatcaacagaagagctccggttagctgaattattcattgataaagttggccacgaggttgtagaaaatgggagggaggatgacaataagctcccggtgttgaggctgcaccttgttgaagttagcccagaacaggaaccaactttgccattggaagaagagaagttggaggaggatgaggaattgttgatcaatggtgaagatagcactttacatgctttagcagtggtaaccgacgcagaggtggtgaagcaagatgttgagaacag

SEQ ID NO: 4917 - DNA, 390 bp, Zea mays
cgcaccgccctcggggtccccgcccaagggccacctcgccgtgtgcgtgggccccgcggcgcagaggttcgtgatcccgacggagtacctgaagcaccgcgccttcgcggcgctgctgcgggaggccgaggaggagttcgggttccagcaggagggcgtgctccgcatcccctgcgaggtccccgtcttcgagtccaccctcagggccgtcgagaagaacaagaaggacgccgccgcctcctgttactgcagcgccgagtacgccgccgacgaggtcgggcgcggcacgcccaacaacccgctctgcagataggtggagctcgaggacagaacaaaaatgtcttcttcctcttcccttttttgtttctttcttcttgctctatgtaacgt

SEQ ID NO: 4918 - DNA, 399 bp, Zea mays
ctgctcactgaagcccacgcagaacccgcttccgagcctcccggtcgacctcctcccgctcctggtcctgggcaacctctcccagcctctcgtcggcctcctgctcccactgttcgacgccgccggcgagccgtgcaagtgtagcaagggcccgtacggccgccccgaggacctgaactacccatccatcgccgtgccgtgcctgtccggcagcgccacggtgaagcgccgcctcaagaacgtcggcgcgcccggcaagtacagggttaaagtcacggagcccgcggggatcaaggtcaccgtagtgccgagcgaattgtacttcggggtcggagaggagaaggagttcaccgtgaagatggacgtggacgtcaacgccccggcggctaatgatgacta

SEQ ID NO: 4919 - DNA, 918 bp, Zea mays
  misc_feature (875)..(884): n is a, c, g, or t
tcgctggcaggtcagtagcactgactggagtatgattttgatagcaggaaagtacataaaacatgataatggattctcgccattgtgttcgccacataatgatgatatagtgcctgtttggacgctggcattgagcgccacaccccgcctaagatacggcggccgattcggccgccataactgcggcgcacaaagtgtggcgcggcgtgctaccagcggcggtgatccaaacacgcccatagactagtgttttagtagtcctttttctttttttcttgtcaacggttcttttgaattattgtttttgttgttgttgttataaagaaatccaatggtaatgccgcagagaagaagaaaaaaacaatagccacagttaacgggttgtctgtgtgtttctgctttgtactaaattttagacatttgttcatggcaggtgagcatatcggattttggtcacgatgacctatacgacatattcggggacatctcatcgaaagggctcccacaagagtcgctgaagaaactaccacactatgtggtcactgaccagacgcgcgcggactcgttcggccagatcctgtcctgccctatctgtctacaggtacaatactgccacggagtagttgtcaatgaaaattacagcctcaatggggacaactgcaattagcgattcccataccgggatttgttcgctactaaatgcgacgtttcttctcctcatcaactgccgacctgacctgacctaacctaacctaacagcgtcctcttcgtccgtcttgcaggacatcgtagccggcgacacagcgaggaggctgcccagttgctcccacactttccaccagccttgcgtggatagatggctcgtggatcgcggnnnnnnnnnngtctgcaggcaggacgtgtgagatagccagatag

SEQ ID NO: 4920 - DNA, 383 bp, Zea mays
ccagacgacggcggccacgggcgcaggcatcaacggagcaactctgccggagaacatgaccgtcagggcggtggtgacgacccatatggccgccttcacctgcaacctccggggcgatcccgggggcgttttctcgaacgcacggagcaggtggaagagaagcacgacgcagaagaagctgacggccacaaacagtatggactgggggtcgtgtctcgagccgtagatggctattgcgctgttgagcccgagaacgaacagcgcgacggccgaggtgcaggctgacgagccgccatcggaggcggctccggtgggagtagtggggttgtcgtcgccgcaaggagcaggatttagggagagtctgagctctctcttcacgaaag

SEQ ID NO: 4921 - DNA, 829 bp, Zea mays
  misc_feature (622)..(622): n is a, c, g, or t
tattaatattatttctgtcctcgaccgaaacaggtacttttgaacatcaattggttccaaatttatatgtagcaaatgtaagtatgtaacaccatcatgcatgcatatttgttcaatattaaaagaatttcatgctggtgcaagaaataccttgaattgagcaagttcttcaggcaaagcaagagaatcctttgtcgttaaaagagggaacatctggcgaagaggagccatatatttttcagagttgtatattttacccgaagcaacatatagggaggttgtattatcgaatcccatgccccttagcatcatgccaacctgcatacatttattgaggacatatcatctccagtaaacccctttttacatattgaaacatttttcagaaggcaacttccccaatgacagcctgaaacttaaccaactaacctgacttgctagctgaaaacagaaaaaagggggaaaatgcaaaaaccaagtctataacaatttgaaggaataactttgaaatcctgactgcatgattcagtgcatacaaagcctaagaggcccaacataaatgtatgtccaacataaaaaatgctcgactcccatgaactggtctactttggcggtacagccnaagaggcctagactcaaaatgtgctatcatagacaaagacaaaagggaaataggtcctaacctctaaaggagtaagagggcacttcccgtcccttctgtttgcctcagggtttatcactcgaccatgccgacgaaacttacctctccagctcctttcacgagcattgtccatttcagttttttccctccagccaccatcatatgtac

SEQ ID NO: 4922 - DNA, 363 bp, Zea mays
tagtgtaacaggtatccaagcaataaagcttttgcattcttttatttttttcttaaaagcaagagccagtacatccagatccatgaatactgctttcaatagaagcgttgttttcagtttctttgatctaattttctgtataaattggtaattgctgaccgagtgacatctttctagtatttgctatttcttaccctgcacttaaaatttaatgtttcttccttaactttcccagctgtaaataattttaccttaagcatgatgggcagcacaggcttcatggctcagttgttattacatgacatttggttatggtttagtccaatattagattcgtacgcttgcgtactataaacaggacat

SEQ ID NO: 4923 - DNA, 321 bp, Zea mays
  misc_feature (269)..(269): n is a, c, g, or t
tctgttagatcgagctcttaaagttcaaagaaaatatgttcaacaatttaatgttgctgtggagcagatctgcaaggcttataatgaattgccaaaaacatctgaagccgcaaatgtagcattgcctgatcagagtgaaaagactacagagcacctggtgaggtcacctgatattggtgggactccaggactgggacaaatggaagatgatccccctactgattgctcaagtacttcagggcaagggtcagggaccgaggaggatgtcnaagatggtggtcatgaaataggtgataattctttggcagttcctcaaaagaa

SEQ ID NO: 4924 - DNA, 714 bp, Zea mays
ggatactcgtaatgttcattgtgtaaatgaggtacgtcctattgtctgcattattcactgtttcttttttattttgttcttcaatttttgttggatatttggatgcatatcaactctttcatgaactgtactatacagttaatggtgaataccacatttcactatcaacagtcatcccaaatttctgttttttccttgcacattttttggggtaaaaatcaattctttgcagccttgttgttatcaattattttcgatctttgtgaaggatctcgcatgcccttccatttttaccaacagttacaacatgttttgctttacaggtaactgaaggggaaaggttgaccctgactctttggttcactagagaccgtgcttatgatgaggatccaaaacttctaaactttctgtctcagacatcattgagctgtgaaccaactgagcaaaattcttatattcctgtaccagcttctgataacatgtatcacttttcttgtgatcagtctggttttgacatacgatgtgctagagtgcgtattcttgggtttagttttcactcaagtagtggtgagtgcaatatatctgcgtcaccagctgaagatgaccaaatagagttgcttggaaagcaactgcggctcgggaggggagatgatgtctttgagaaaatattttctaacagcttacatgctcttcaggtatgttcattctttgagt

SEQ ID NO: 4925 - DNA, 393 bp, Zea mays
ctccattgctctcctccaccccattctggttcccattgctagggttcgtcgtgctagggtttaggtcgctccttctccaccacctggccgcccaccctccacctctcgtgcttcccggacgccgcggccgccgagacgatggccaggagcaggagccaccgagcaatcgtcgccaccgccataaaccaagctaactaaggcagctagaatctctgctttgagttcttcccctgtccccgcacgggctgcgatctctgctttttttgggttccccaatcccattccgtgtcctcatgctgccattttggggttcaaggttcgtcgtcaggttcatgtgctttaatgtcaatattggtatgggcgatactgaagttaatgccagcggttattgtc

SEQ ID NO: 4926 - DNA, 407 bp, Zea mays
ctcgtcgccgcgctcaagggcaacccgggcctcctcaccgccgacctccggacggtcaagtccaccgtcgcgctgctccaagaggaaggcaccctcaccgatggcgacgtcggctggttcgccatctcatactgctccaagctgcttgtcgcgagcccggacgaggtcgactccgtcctagcccgcgccgacgagttcggcgtgccgcgcaagacgcgggcgttcaaggacgcgatcatcgcggcgttcagcgtcactccggagcggctcgcatggaaggtcgcgttcttcagggacgagctcgggtggacggaggcgcaggtgaagacggcagctgcgaagatgccgacgctgatgacggtctccgcggagcggatccggaggaactgggagttcctgaccacaga

SEQ ID NO: 4927 - DNA, 413 bp, Zea mays
gtcgcagaggatattgacagaacttcagcctggagaagcagaattatcagatgattctgtagtgacaccaacaacaaaggcaactggtgatcttgttgtgagacaagtcagttttcttcggagtttatctctcctcccagctgattacaagaattatctccgttcgaagcgtatgaaggccatgcaacctggtgatggtggagcaatattgaaatatttacagacaatgcaaatggataacccctcgttcttttacactatgcagatcgatgaggatgacaaactgacaaacttcttttgggccgaccaaaaatcgagagatgacttcaactatttcggtgatgtgctctgcttagacacaacatacaaaataaacggttatggtagaccgcttgcgttattccttggtgtga

SEQ ID NO: 4928 - DNA, 379 bp, Zea mays
cggcgccaaatgaggcgacgacgtctgtgcgctcaccctcggtgaggagtgcacagaccaacgacctccgggcaaagctcaacagcaggcgtgcgggagaggatgcccgggtctccctggagagggcacgggagcgccgacgaaacatcgagggtcgcaacctcgatcaggattttgctgcggtagcaccgcaaaccccagcaggtgcccagatccaggcgggtgtcccattggccgacgtgggttgcgccacgctcgcggatcatctccgcgcggcgacctggccacccaagttctggtcacacttgcatctccacgcggcgtgggcaggagcctggggaaactctccggaccttcatctcccgcttcaccagggtat

SEQ ID NO: 4929 - DNA, 346 bp, Zea mays
ctgtgacgcctgccgagtactcgacgtaaatcctgaaccagggtctcatcattgttcgtgtgaagttcaagccgattataattttggaaggagatttggtgctgaagtcgaagccagtagcccctttattcttcgtcgtcaacccacgccgcgtcgcgacgtgcccgtcgatcccgacgctctatctgccagttgtgtgccacttgtgttgagctctgaagcccctgtcgagctcttcctctggaagccgccttcgaacacaacccttgctaagtgttcgataggaagcctgaaccaatactcatcgttgatctacgattattaaatcgttccggtcatagtaagc

SEQ ID NO: 4930 - DNA, 356 bp, Zea mays
tgatgctatttgcttccaactaataaggataatgaggaacatttattcaagatgattaacttaagcgaccaatctccatttatgatatttactcaatcaacaaccatagaacatgataattactaaaacaaagcatcacttcaccaattaagaatcagctaaacttacttagccaaacaatagtaacttcaagccaacaatttaatacttgcagaatttttagacagcagcacagcggttaattgttttattcataactcacaaaatatgcatccaaaaatagtaaactaggactttctggaaagcttagaaagtcctctataactcttatattatcatcacaacatgattcgaca

SEQ ID NO: 4931 - DNA, 728 bp, Zea mays
  misc_feature (510)..(512): n is a, c, g, or t
  misc_feature (642)..(648): n is a, c, g, or t
  misc_feature (668)..(689): n is a, c, g, or t
  misc_feature (711)..(717): n is a, c, g, or t
  misc_feature (720)..(725): n is a, c, g, or t
tagagctctagcgaagactggagtaccaaccagccggcagcacgttgtcgccggtctccatcacctcctgaggatgcagcagccatccggactggaaggaaaccagaatgcgcctccgtcatgaagcccaaatacctgagcaaggcctgtattgacaaagaaaaattttcagaatgtgccttttgtttttgcaagcatgaacaatgggcaaacattgatgcgttaattctttagctggtaagtacagattgaagttggtgcaaaagcaaaaggcaggtggtattttttttggttagtacagcgtgaagcccaaatatattgatgatatccgccttgaaataaccttggaatttgtctcacgtgacgtttggatcccttcattttaaaataattggaattcacttaataaagtaacttatttagtttggaatttgatattctaccactttttaaagtttagatataagactatctcaaatttatggggtgtaagatgagaaatgattttannnattagtagaatttgtttctactctgcaacttacataacactctttgtctcactcctttatttaaaaatgtaacacataaatatctccaacatcttattaataatagtatacaaatatattttgcataaannnnnnntaacttaattgatatatgtnnnnnnnnnnnnnnnnnnnnnnaattcaattccattgatctaannnnnnncgnnnnnngat

SEQ ID NO: 4932 - DNA, 452 bp, Zea mays
  misc_feature (446)..(447): n is a, c, g, or t
tcatacaagtttagttgatgagtttcgtaaaccaaggcaagacaatgtgcaaggagacgggacaagcgatgatgaagatgaaactatatggcaatatgttagtgatgatgaaagtccaacaattcttgtcgaggatgatgatgatgatagcgatgccgagtaaagactagagtaagttgtctctagttgaatatatttttttcacctttcacatgctatatttatcctatacataccttctaaaattatgctttttgattgtctttactgtagaagttgatggtggaagcgttgctgacttatatggatcttggtcatgaaaatggtgacccacatggatattgggtcactatgataggatggtggcaattagtgtgtgctaggatattaaattttattctagattttgggatgtcctaggtcttttagctcggacaaagtctatnncttgt

SEQ ID NO: 4933 - DNA, 743 bp, Zea mays
ctcctcgaattgcaccaagtgatcgaaatcggagattttgatcgagtgcatttctcttcggtactgtatcttaagtagcaatagaaatcaatcttttcatggccattgtgtctggagttgggatgcctacatcctccagactccagttggaatctcttttttacatcatcaagtagcaatagaaatcaatcttttcatggccaggtcccttcaccaagaatttggccggtttctcaactatctccgattcattccatggcaaattaagcctctcagagatagtctgctgcatctccactgtgttcagggtctctgaattggatacttcaataaagataacaacctggaatacccaatttaaggaaaggtataaaaaaaaagagccacatccactccatgctgtaaaaatcaaatatgcatagttcatgtaaatatccatagtttatatctgaacctccaacatcttcagcttgaactagtactcgtgaacaacatattagctgtgcctgtgctatacatgcgtgccagaaatgcttggctacacaagaacccatttctgaaagtctgaaactcaaaacatttgcactttaatttaattcgttctgcatatcattctgaacacactacgaaagtaagcaccattaaattcatccttgaagcaatcctatatatgcaattcaaaacaagaacgcaaagaagcagattcacgtatattctgaatttctgatgagtaaattgcagct

SEQ ID NO: 4934 - DNA, 391 bp, Zea mays
cttgtttcttgccactggttttgatggggatggtgctctctttcctctggcatttggcgtggttgatgaggaaactgacgagaactgggtatggttcttgtctgagctgcatgagttgctggagaagaacacagagaacatgccaaggctgaccatcttgtccgatagacggaagggcattactgatggagttgaattcaacttcccaactgcattccacgggtactgcatgcgccatgttagtgaagccttcaaaaaggagttcaacaatcctgtgcttgccaaccttctctgggaagctgctcatgcgctgactgtgattgagtttgaaactaaactgctggagatagaggacgcttcaccagaagctgttgtttggataaggcaccta

SEQ ID NO: 4935 - DNA, 611 bp, Zea mays
  misc_feature (351)..(370): n is a, c, g, or t
  misc_feature (379)..(422): n is a, c, g, or t
  misc_feature (425)..(431): n is a, c, g, or t
  misc_feature (456)..(459): n is a, c, g, or t
  misc_feature (463)..(468): n is a, c, g, or t
  misc_feature (480)..(489): n is a, c, g, or t
  misc_feature (505)..(505): n is a, c, g, or t
  misc_feature (553)..(553): n is a, c, g, or t
  misc_feature (569)..(572): n is a, c, g, or t
  misc_feature (600)..(607): n is a, c, g, or t
aagaagaaattaacatgcaagccattacattacatcaaggactaattaactgccccgggagagcattctcttgggtgcacggtaattacacgggctatctcgagataattaccacaaacaccccaaggttaactatctccacacgtcttactccctgccctcgcaatcctgagtctattacaactctaccccctaaccttaaacaaaagaaccagattaattaattaccccttgactccggccgtcgagctcggctcggtgccgctgccggcatcgtggatcggaccgacatggccgtaccgtacgtgaccgtgagcaggcgatcagcacgcataatactcgacgagctcnnnnnnnnnnnnnnnnnnnntcggtccgnnnnnnnnnnnnnnnnnnnnnnnnnnnnnnnnnnnnnnnnnnnnagnnnnnnntaattaatctggttcttttgtttannnntagnnnnnngagttgtaatannnnnnnnnntgcgagggcagggagnaagacgtgtggagatagttaaccttggggtgtttgtggtaattatctngagatagcccgtgtannnnccgtgcacccaagagaatgctctcccgnnnnnnnnaatt

SEQ ID NO: 4936 - DNA, 351 bp, Zea mays
  misc_feature (343)..(343): n is a, c, g, or t
ttgattatcgagtagatacagatcctccaagttggtgcagtttccaattgaactgggcaaaactccagacaacatattttcctgtaaccacaatgacttaaggcttgtcatttcaccaaccgataagggcaccgaaccactgagctgattgtcatgtaggtacacttgctccagaaactggttcttgaacaactcctctggtattgttccattgaaggagttgcggtacagtgacagtgatgaaaatttcttgaggttgcccaatgatgctggtatattgccagaaaaaaggttttgggacaaatccagttcttcaagcatactgcagtctcccaattctagngggatcaa

SEQ ID NO: 4937 - DNA, 1112 bp, Zea mays
  misc_feature (740)..(742): n is a, c, g, or t
  misc_feature (865)..(867): n is a, c, g, or t
  misc_feature (882)..(886): n is a, c, g, or t
  misc_feature (1010)..(1010): n is a, c, g, or t
  misc_feature (1012)..(1022): n is a, c, g, or t
  misc_feature (1051)..(1063): n is a, c, g, or t
  misc_feature (1094)..(1105): n is a, c, g, or t
ccaggaccgacaaatgtaaatattgacagagacaaatgaaatccagtggaatgaatgacgtgcatcagtggcatattaactccaaaaaggtgagaaatgtgtcccacaaggcaaaccgcacataatgcccatgatacagcaagttctctacctagaagaacaatcagggcatcatgtcagcaattaagttaacactctgtataataaaaaatgggagtttgcaaacataccaatgggccaaaccccagttttctgtttttgcactgctggatgtctcaatggcagctggcaccagggcccgcttgtcattgagacatgccatggtaaaatagcaaacaggggtaacgactagtggacagtggcatgtttgcaaattttccttttaaaaacatcatggactgggagaagcttgtaagctgatggttacttgtgtcaacaaaaaaatttaccactttgtttcagctgttcaagtttgtcttgcatctttctttcgaaaactgtttgtgaaccaacctttgaagaatctgcagatcaaatagacatttgcatgagtatgaagactgaacatacaagcagcagcaaaattttggagggggtttcatatttgacagaaggggaaagtggatattatatatttgcaacatgttgtctgtgctcaagtgtaccatgtgagcaaagaagactttgcattcatttatctcaactctcaagacaagattgactgataagcaacatgaatnnnaaagcactgcttcatctttccatttaaaatatccagaagaacatccagttggttaagagatttaactatttgagttatggtcgtcgacattttctattgaaaagaaaaggtattattttagtnnnttattttttttgaannnnnaatggagctctgcctttcaattaagataggaaaagagcgtaagtacaggttaaaaattacagtgcacccagggacacgagggagcagtgttaaaaaaacatccattattttagctctttattcnannnnnnnnnnnaacaatgtatccattattcaactgccccnnnnnnnnnnnnnaaatgtgcaagtttagccctttgacagtacnnnnnnnnnnnnttgcagc

SEQ ID NO: 4938 - DNA, 705 bp, Zea mays
atctgaaacttctactgatccgttacatgacgtagagagagggccctaggatacatttccttttttttgggttaccttttggctttatggagaagctttgagcaaggcagcttttctgcgtccatcagccacagctgatttcactgccatagttttcttcaagcagtagttttgttcctgtcaaatgaccaactggtagtggtaagcaggtacgatgtgctcggtagcgaggctggcgtttgtgcttgcactggccatagccgcctcatcaattacggttgcggagagcagagattttaatatctttggtaagctttcaatctactgatttttgctccttactctctttattcgttgttgaatgttgattcatagcagtgaattatcaggtctagtgatagtttcttttcgatggagatctcgtgatagtttcaattagtttatctaaattccttatctgtttgacaagttcgtatcttcatttagtccggtgacatgttaaagaaagcaattacgtctaagccatcagttctactcactgtagagggcgtagcttcagcttagctgctatttcctcacagtaactcaagtttttctgaagttttgcatttctggccaatcctttcttctgtcttcaattcagctcagggcagcttgcctgatgcaaccaagggatcgtcaggtctagctgcaaccagtggaaag

SEQ ID NO: 4939 - DNA, 2295 bp, Zea mays
  misc_feature (2065)..(2066): n is a, c, g, or t
  misc_feature (2080)..(2080): n is a, c, g, or t
  misc_feature (2083)..(2085): n is a, c, g, or t
  misc_feature (2088)..(2088): n is a, c, g, or t
  misc_feature (2090)..(2090): n is a, c, g, or t
  misc_feature (2092)..(2092): n is a, c, g, or t
  misc_feature (2099)..(2102): n is a, c, g, or t
  misc_feature (2105)..(2105): n is a, c, g, or t
  misc_feature (2107)..(2107): n is a, c, g, or t
  misc_feature (2112)..(2112): n is a, c, g, or t
  misc_feature (2114)..(2116): n is a, c, g, or t
  misc_feature (2124)..(2124): n is a, c, g, or t
  misc_feature (2126)..(2127): n is a, c, g, or t
  misc_feature (2129)..(2129): n is a, c, g, or t
  misc_feature (2132)..(2134): n is a, c, g, or t
  misc_feature (2139)..(2139): n is a, c, g, or t
  misc_feature (2146)..(2146): n is a, c, g, or t
  misc_feature (2148)..(2148): n is a, c, g, or t
  misc_feature (2152)..(2152): n is a, c, g, or t
  misc_feature (2154)..(2154): n is a, c, g, or t
  misc_feature (2159)..(2159): n is a, c, g, or t
  misc_feature (2161)..(2162): n is a, c, g, or t
  misc_feature (2164)..(2164): n is a, c, g, or t
  misc_feature (2173)..(2173): n is a, c, g, or t
  misc_feature (2175)..(2176): n is a, c, g, or t
  misc_feature (2180)..(2180): n is a, c, g, or t
  misc_feature (2186)..(2186): n is a, c, g, or t
  misc_feature (2190)..(2190): n is a, c, g, or t
  misc_feature (2194)..(2197): n is a, c, g, or t
  misc_feature (2205)..(2205): n is a, c, g, or t
  misc_feature (2208)..(2208): n is a, c, g, or t
  misc_feature (2210)..(2210): n is a, c, g, or t
  misc_feature (2212)..(2214): n is a, c, g, or t
  misc_feature (2221)..(2221): n is a, c, g, or t
  misc_feature (2223)..(2224): n is a, c, g, or t
  misc_feature (2231)..(2231): n is a, c, g, or t
  misc_feature (2236)..(2239): n is a, c, g, or t
  misc_feature (2246)..(2246): n is a, c, g, or t
  misc_feature (2248)..(2248): n is a, c, g, or t
  misc_feature (2250)..(2250): n is a, c, g, or t
  misc_feature (2253)..(2253): n is a, c, g, or t
  misc_feature (2257)..(2257): n is a, c, g, or t
  misc_feature (2259)..(2259): n is a, c, g, or t
  misc_feature (2262)..(2263): n is a, c, g, or t
  misc_feature (2269)..(2271): n is a, c, g, or t
  misc_feature (2275)..(2275): n is a, c, g, or t
  misc_feature (2278)..(2280): n is a, c, g, or t
  misc_feature (2282)..(2282): n is a, c, g, or t
  misc_feature (2286)..(2286): n is a, c, g, or t
  misc_feature (2291)..(2294): n is a, c, g, or t
ccactctctttcccaccgccttcttccactactcttcaccctcccctcctccccatcgcgaactcacaagagaaccaagtagacgagggagaaggagatggcgaagaagaaggagaaggcggtgaacgtgtcgggcaagccgcggcactcgaacgacgtcaaccgccccaatgacaagaagggcgcgggcggcggcgccggtggcgggagccggtccgcggctaccgtgcggcggctcaagatgtacaagacgcggcccaagagggaccgctccgggaaggtgctcaggaacgattttcagtctaaagagctccccaacacccgcatcgagcccgaccgccggtggttcggcaatactcgcgttgtgggccagccacagcttgaaatgttccgggaggaactccagagtcggctttccgacaacttcagtgtcatcctgaaagaacggaagctgccactatcgctcctgcaagatcatcaaaagcaagcgaaggcacatctgcttgaagttgaaccttttgagcatgcttttgggccaaagggcaagaggaaacgtccgaaactaactgctcttgactacgaatctttgctgaagagagctgatgattcccaagatgtgtttgagcaaaagtatgcttcatcaaagttgccaagggaggaagaagaagatggcttacgtgatctagtgaggcatacaatgtttgagaagggacagagcaaaagaatctggggtgaactatacaaagttattgactcttcggacgttgttgtgcaggtgttggacgccagggatccaatgggcactcgatgctaccatctagagagacatctaaaagagaactgcaagcacaaacacttggttttcttgctaaataagtgtgatctaatccctgcttgggctacaaaaggatggttaaggaccctttcgaaggactatcccaccctagcattccatgcaagcatcaacaagtcatttggcaaaggatctcttctgtcagtattgaggcaatttgctcgtttgaagaatgacaaacaagctatttctgtcgggtttgttgggtaccccaatgttgggaagtcatcagttattaacacactacggtcgaagagtgtctgcaaggttgctccaatacctggagagacaaaagtgtggcagtacatcactctcactaaaaagatatttttgattgattgtcccggtgttgtatatcaaaacaatgattcagaaactgatatagttctgaagggtgtggtccgggtgacaaatttggcggatgctgctgagcacattggtgaagttcttaggcgtgttaaaaaggagcatctccaaagagcgtacaaaattcaagattggtctgatgataacgattttcttgtccagctgtgcaggaccactggaaaacttctcaagggcggggagcctgatctgacaacagcagccaagatggtacttcatgactggcagaggggtaaaatccccttctttgtaccccctccgcagcaaagcgacggcggtgcatctgaaagtgctgaacaacctattgggattaccaaagaggacggagtaagcagcgacaggactgccgcagccatgaaagccattgcaggaataatctcgtcacagcagaacatgaatgtgccctgccataaggaaaacaatgcagacaatgaagacactgaaaatgcagataacgaagacattgagagttcagataacgaagacaatgatgacatcgagcctgcagagcgatctgagtgatctttgggtacagatgtggattattagagttgatatgtcaaggctaatgaatttgtcagcccaggtgttgtgtagctacttgaccatatcactggcgtgccaggaaaaaaaggatcatgttgagttgcactttttgtaactatcgtacctgaatctttgtaatagggcaagaagagcagttttgctaggtacctggttgtatcgggatgcttatctgtgctgtctactacagatacagttacatctattttacttaaatcaagtggaagttatctctaaaaaaaaaaagcggcttcggcccctttnnctttcccagtttgnttnnntcntngnccttctnnnnccncnttgcngnnnccttctcntnncnatnnnccttnctttttncntttntntcctngnngnttttttttntnnttgngctgcncgtntttnnnntccactcnggngntnnnttttctngnnctggttnttccnnnnctttttntncngtntgtncntgnntttttnnnctcnccnnntnttcntctcnnnnc

SEQ ID NO: 4940 - DNA, 1710 bp, Zea mays
gattactcattgcttcctgcttctatgtatgtgcagatgggttgtacttgatagaggttgatcgtatcctgcgtcctagaggttattggattttgtctggacccctaatcaactggaagaaacactggaaggggtggcacaggactaaagaggacctagatgcagagcagaaagccattgaggcagttgccaggagcctctgctggaagaagatcaaggaggaggatgacattgctatcgtgttattatacggttccgttgcaacgcacgggcactgccccggggccggccggggttgctatctctacttttgacctaaaatccggcctccacggctccacccacgagccagtggaatcttaccgattcggcaaccgtgctaatcgatatccgtgcaattccacctcccgaaccgaatccctccaccgacccaaaccctagcgcgcacccttctccgtcgtcctttcctggcgcgcgggccggtgtcggagatgcgggcgctgctcgcggacggcgggatggcactggcggtgtcgccggaggccaacgagtcgtcgggtggcgctgcggtgtcgctagggccgttatcgtgggcgtcggagtgccacggggtactgtacaacctggccttgatgctgccatcgctggcctttgtggggttcctggcgtggcaggcgcggcggagcttccgtaggctcagctacggccgctctcacgtcgttgtcgtcgcgtactacgcgctcctctgggccgtcgccgtactcaacctcctctggtgcttcctgcaggcatggcaatgtatgcctgacagggcattctcttggaatatactgtcactgtttacaaaatcaggaatgttattcttggaagtgagtctcatagcctttctacttcaaggaaatgatgccagcggttttgaatctttggcacgaacctttgttatatctggagctgtagttgctgctgatgtattgctcaagactatatatgtttttggcttcggtgttcctttgttcattgatactgatcaaggaactagtgggaaatggggcctgtggattctccacaaacttgtgcttactggagtctatgggctgattgttttcatgcatcattcaagatggagagacaggctgcctgcaaaaccagcatactacaactatgtatgtgtgatgttgctactgaatggcatatcactgtttggatgtttccttattgcaagtggagctggatttggtttatggttatataatctcacaaccgtatgctatcattctctttaccttcccctcctatatgtgactttcttagcagacttcttccaggaggaagacatgctcctagagaacgtctactattctgaaatgaaggatgctgggttcttcgatgctgactgggattaatccgtggctactgtgctgtatgacccatcccatatgaagtacgctgtatttgtttttattttatctgtgtactctcaacgtagaacaggaaatgtatgtagctagccgtggtagtgaatggaaatatgtaatcttactgctgcatacttcagaaaatcagaattcaagtgatttcacggctgagattgccatctcaaaaaaaaaaaaaaaatttacgtcgatggtacaaaactacgaagtcggtcgtcaaaactgcgtttttgcaggctcgttttataaatgtaagcgtatcacccaggattctacc

SEQ ID NO: 4941 - DNA, 1780 bp, Zea mays
aagaactctacataaaaccccaccacaagggcgcggcccgcacacggttcctctctgaccactcctctcctctcctctcctctcctctcgccggcgcatcgcccgactgtcagtcagcctcagccatggccgcggaggaggagcagggcttccgcccgctggacgaggcgtccctgctcgcctacatcaaggccacgccggcgctcgcctcccgcctcggcggcggtggcagtctagactccatcgagatcaaggaggtcggcgacggcaacctcaacttcgtctacatcgtgcagtccgaggccggcgccatcgtcgtcaagcaggcgctcccgtacgtgcgctgcgtgggggactcgtggcccatgacgcgggagcgcgcctacttcgaggcctccacgctgcgggagcacggccgcctgtgcccggagcacacccccgaggtgtaccacttcgaccggaccttgtcgctgatggggatgcgctacatcgagcccccgcacatcatcctccggaagggcctcgtcgccggtgtcgagtacccgctgctcgccgaccacatgtccgattacatggccaagacgctcttcttcacctccctcctctataacaataccacggatcataagaacggagttgctaagtactctgcgaacgtggagatgtgtaggctcacggagcaagttgtgttctcggacccataccgtgtttccaaatttaatcggtggacctcgccttatctcgacaaagatgctgaggcagttcgcgaggatgatgagctcaagttggaagtagctgggctgaaatcgatgtttatcgagagagctcaagctctgattcatggagatctccacactggttctatcatggtgaccgaaggttcaactcaagtcattgatccagaatttgggttctatgggccaatgggttttgatattggagccttccttggaaacctgattttggcatactatgcacagaatgggcatgctgatcaagcgaatgatcgtaaggcttacaagaaatggatcttgaagacaattgaagagtcgtggaatttgttccagaaaaagtttgttgaactatggaataaacacaaagaaagcaatggggaggcatacctgcctgatatatacaacaagccaaagcttttgagcgttgttcagaagaagtacatgacaaacctatttcatgatagccttgggtttggttcagccaaaatgatcaggagaatagtcggaatcgctcacgtagaggatctcgagtcaatcaaggatgccagcaagagagcggagtgcgagcgtgctgccctcaactgtgcgaagacgatcctcaagggaagacaccagttggagacgatcgagcaagtcgtcgagcatatccagtccttcgatcaggactgagaagacgacagtctatttgtgcgctgaagcctgaaggagacatactctcgtcaattaacccacgcatgcccgagtatcgatgaatcgtctgttttgtagtgatgaagcgcccggttgtttgtgatctctgtattggttgctaggtgagaaaagtatgtggtctcctggcttgaactgtgtgtacactattattccgggccggcatagcgagcagctgaataatgaaatgtacgggtcctcagtgaccatctcagtgcatataaacacgtgtgttaccaataaattttgttatggtgctggtggttctatggcaaaaaaaaaaaaaaaatgttgtttggttgcattacttgcatatatgaacatctgatccgattcag

SEQ ID NO: 4942 - DNA, 3780 bp, Zea mays
atgagtccgtctcgacagtgaccggacctcttcgttagggttgaccgcctcttctctccgtctgcctgtgctactactagggttagggctccggcaaggcctccctcgcgccggcggcgtcagcagcggatatgggtgttccggcgttctaccgatggctggcggagaagtacccgatggtggtggtggacgtggtggaggaggagcccgtagagatcgagggcgtcaaggtgcccgtcgacacctccaagcccaaccccaacagcctcgagttcgacaacctctacctcgatatgaacggaatcatacacccctgcttccacccggaggacaggccctccccaacaacatttggtgaggttttccagtgcatgtttgattatatcgacagactattcgtcatggttcgcccccggaggcttttgtacatggccattgatggtgttgctcctcgtgctaagatgaatcagcagcgctcaagacgattcagggctgcaaaagatgcagctgatgcggctgcagaagaagaacggttacgtgaagagtttgagagggaaggcagaaagcttcctccaaagcagcaatcacaaacatgtgattcaaatgttattactccagggactgaatttatggctgttttatcagttgctttgcagtattacatccatcgtagattgaattatgatcctggatggaaacaaattaaagggaacataaaaacatgtcccacctggccaacggaatctgtctggttttaacccaaatacgcgccattgcctgtatggcctggacgcagatctgatcatgctagctttggcgacacatgaagtacacttctcaatactgagagaggtagtttatacacctggacagcaggataaatgcttcttgtgtggtcaggtgggacatctagcagcaaactgtgaaggaaaggtgaaaagaaaagctggggagtttgatgagaagggtggtgctattgttcccaagaagccctatcagttcttgaatatatggaccctgcgggaatatttagaatacgagttcagaatgccaaacccacctttcaagattgattttgaacgcattgttgatgatttcatcatcttcatgtgcttctttgttggcaacgattttcttccacatatgccgacgctagagatccgtgagggagctattagcgtgctcgcggccgagtgtacaagaaggaatttccctcaatgggtggatatttaactgattcttgcacgcctgatctgagcagagttgagcacttcattcaagcagttggttcatatgaggacaaaatatttcagaaaagagcacgtttgcatcagcgtcaagcggaaaggataaaacgggaaaaagctcaagcaaagcggggtgatgatctggatccccatgttagggatgaccttattgtacctattcaacgttttcaagggtctcgcctagcctctggggctgtacctgtgccatatgagcagaatggatcccataaagacaataaagaaaggaatagtcgagcccggaaagctgcacgagtatcaacgtcaggttccagcattgcctcagccttagttgaagctgaaaatgacctcgaagcccaagaatgtgaaaacaaagaagaactgaagtcaatgcttaaagatgcacttcgcgagaaatctgatatttttaattctgacaatccagaggaggataaggtgaaacttggagaaccaggatggagggaaaggtactatgaagagaaatttggggcaagaacacccgagcagattgaagaaatacgcagagatgttgttctcaaatacacagaaggattgtgttgggtaatgcactactattatgaaggggttgcctcatggcaatggttctacccttatcattatgctccgtttgcttcggatctaagtggattgggccaacttaatattaaatttgaacttgggacaccattcaaaccttttgatcaacttatgggtgttttcccagctgcaagtgcccatgcgctaccgctacagtatcgacgattgatgaccgatccaaattcaccaataattgatttttatcctacagattttgaagtagatatgaatgggaagagatattcttggcaagggattgcaaaactaccgtttattgatgaagatcgtttgttggctgagataaaaaaagttgagcatactttgacgcctgaagaagcaaggagaaacagtatcatgtgtgatatgctttttgtgaatgggtcacatccactttcgccttatatctactctctcaacagcaaatttgggcatctgcctgacaaaaggagaaatgaaattaaagaaaaacttgatccttctgctagtggaggaatgaatggatacataacactttgcagtggggatccatgccctcctatctttaggtctcctgtggacgggctggaggatattatggacaatcaagtgatatgttcaatctacaatcttccagaccatcataagcacatagcccagccgccagttggtgttatcatgcccaagaagattgttgaagccggtgatctgaaaccacctccagtgctgtggcatgaagatagtggcaggcggcctcatgataatagcaacaggcaaaacccatctggtgccatatcaggccgtcaacttggagaggcagctcaccgacttgtcataaacagcttaaatgctcagggtagggggcaacatagtggcacatcaatgccatatcgaactataatgaatggcttgcatcatctggatgtagcgtcccctgtcagcaatcaaggcatgcgtccacaagtggggcagtctgccggacctcctggttggtatgttcctaggggtagtgtatcaaatggtcaaccaccagcttatgcatcatcaggatcaggtcattatcagtatgaaagttcggggcattcacaatatgaacaaggtaaccatggaaggcaacaatctcacccatatgcaagagatggcttccatgatacacgaggaagggttccacctgcatatgggtaccagcagagcaacatgtatccatcgggtcctggattgtatgggcaacctccatcagcatatcctggggttcatggtggaggctaccaaccccctccatatggcggaggccagcagtggcagcaacaatcatatagttcgtatgccgtgcgaggcccctacggaggcaggccaccacccacaagggctgattcagggtcacagcaaccacagaaccgttatggtgctttagacagaagtaacaaccggaggccttcatctggatacagaagataatagtttgtgacccagtttatgttatagctcaaagtttgttatcagtagagcttcgagtaactcagctaaagcataggcggaatagtctgctaagtcttgtgaccttcaagcagttagggggtggcatcaaagatattgggaggcaaaatttgtatgctagtgcagactttcaggtactagcggttttgatcgccattgaagcagctaggtttgcggcatcagaggttttgcgaagcaagatttgtatactactgttatcaacgggccatcaggtactggtggctggtcgccattctttatctgtagttaccatttgtttagaagatgtcataaacggccctggggcttaaataggtcccattgagaatatttttgaaggacgtttactctgagacttgacaagttttgggggcattttgatatcagataaatgtatgcaggagtgcagttttgatgatgtgtgtattccaagtcattaatt

SEQ ID NO: 4943 - DNA, 2756 bp, Zea mays
ccacagacccaaatccgcaaatcggcaccccggaagcctcaaatccgctctattcctctctccccctctctcccccatcgcaccagcaggcgagcgcgaggcggaggagtagagatggagtcggaccagggcaagcttttcatcggcggcatctcctgggaaacgacggaggagaagctgagcgagcacttctccgcctacggcgaggtaacgcaggccgccgtcatgcgcgacaagatcaccggccgcccccgcggcttcgggttcgtcgtcttcgcggatcccgccgccgtcgacagagcgctgcaggacccccacaccctcgacggccgcacggtcgatgtgaagcgggcactctcgcgggaggagcagcaggcctccaaggccgcgaaccctagcggtggaaggaactccggtggcggaggaggcggcggtggcggcagcgatgcaagtggtgctcggacgaagaagatctttgtgggcgggctgccctctactctgactgaggatgggttccggcagtacttcgagacctttggcatagttactgacgtagttgtcatgtatgaccagaacacacagcgcccacgtggtttcgggttcatcacctttgattcggaggacgcggttgaccgcgtgctgcagaagaccttccatgatcttggtgggaagctggttgaggtgaagcgcgcattgccccgtgaggcgaatcctggcggctctggtggtggtcgttctgggggaggtgggggttatcagagcaacaatggccataacaccagctctggtagctatgatggtagaagtgatggtggcaggtacgggcagacacaacagggtagtggtggtggtggctatcctggttacggtgcaggaggctatggtgctggggcagctggatatggatatggtgctaaccctgcagttggatatggaaattatggggctggagggtatgggggtgttcctgctgcttatggtggacattatggaaacccaggtgcagctggttctggttaccaaggtggacatccaggctcaaatagaggaccttggggcagtcaagctccatctgcatatggaactggagggtatggtggcagtgctgggtatagtgcttggaacaactcttctggtggtggcaatgctctgaatagtcaagcccctggtggacctgcaggctatggaagccagggctatgggtatggtggatatggaggggatccatcatacgctagtcacggaggatatggggcttatggagcacgtattgatagtgctggcaatcctgctactggtggatcatctggatacaatgcaggctatggaagtggtggtgccaactctggctattcaagtgcttggagtgatccttcgcaaggtggtggatttggcggttcggtcaatggaggtgctgaaggacagtcaacttatggcactggctatggcagtgtgcagcccagggttgctcagtaaagagaggcattttgagtgtgcgaaatgaaccagtgcatctgggcagtctatgtattgatttgtcattccagtctctctggttgctctcagcattttgaagattgcccatttgctgcttaaatcagtatttatccgggttggaatgcttgatcctttagcggcttactactagaacgtctagtcaataagtagctaaaatgtggagtagcagtatcttgcggaatgcttttattaatttttacatttagctttatccatctgtgtggtttgccatgagtggagtttcaggttgcttcatctctagttataagctagagtagcttgactacttatgggcaaaattatctagttgtacctctattctacagatcatatatttgtgtttgacattagtatttatgctggatcttgctctacctacattctggaatgttctccatttggtggctgtattgacatgtggtattatcaacattgatgggtttgaaacagatgcaaaccctgaaatatgcaatcatagttacttgatgctgtagctgcttctaacagtattttcaactgtagtgcaagtgtttttatgtagctggaatggtacacccttcaagtatatcaccaagctatgaattccatccatttggtcctagatttcaatattttcaaagcagcagtaagcttattagcagcaagattgtagcgccaagtttctgaggttgaatgggatggcattctttttttagatatgcccaagcaaggtctatgaaatcaggcatttgaaaaaggcattttgcacagtgatttacatgaacaggcgagaagttccaatatcggggttctgacagaatgcaagataccagcttaagtgcttcattttctgaagggtcttgtgctgtgctacaagatagtggacgaagtgcaacatgttggctggatccactttggctgggtctgagggagcatgggccaagatcttgggggctcggctgtgtggtgcaacgggcagcttgcttgcatactggtgatcgtggatgcttgtgatatagcattgccccccaatgtataagtgaacttttagtgctagaggcttccttttgttggcatgatgtctatggtttataggtgcagtagttgcataacacatagtatactcagtatactttgtgtggaagctattgatgcttttctttttgtttaggcatgaatgccatataattgtacattgaattgacatattaagttattgctaaaacacactccagtgattttaaaaaaaaaaaaaaaaa

SEQ ID NO: 4944 - DNA, 2386 bp, Zea mays
aagagatcagtgaagcccagcccttgccttgaagacggcgctcctttcccccaccagcaccagacactgaagggggtaatgatgaagtatcagttcaagagatcagtgaagcccagcccttgccttgaagacggcgctcctttcccttcaagctccgctttcttctcccgcacctggcgatcttcacgatgttgttgttgcacagcaggtccggactgagtatttcctatttggttctatttttagtgcactataatatcgcaagcgaacctacaattggttgtgagctatattggcatatccttccctttgttgtattcccgcgtggggccccccggggccggccggggtgccagcttgagcattccactttgctagccagcatatacttacacgtagctagcttaataatcagcagctggtgcagcaagagtaacagctagcgacgacgaccatatggcggcgaagcagccagtcgtcgctgctgctgcctccggccaccccaagatgggggaggagaagctgatcatccggccggagaaggtgcggttcatagacgtgctgtcgatgctgctcctgaggcgccccatcaccagctacgcattcgtggaggccggcgaccggaccgccgccgacctgggcagcacgcccggcgactggctcgtcgcgctcacgcaggtcatccagaaggcgctcgccggcgcctactacccggctctcgtggtcggcgccgtcgtcgagttcctcctcaacttcgtcgcgctcaacaatggcatactcggcatctttctcaacctcttcagatgtaagctggtgatcccactgaaccgggaggcgcccaacttccggtccatgatcgggatgatcgacgggaggacggagctgaagccgctgccagccagcggcggcccagaggaccggcggctgcaggtggtgggcgtctccgccgccgccggatccggcggcgatgactactacttggacgtggagagcggcagcgcggcggtgccgctggtgcagcagcagtacgtgaacgggcggctcgtccgcctccgcaccttctccgtgttcgaggtgagcatgatggccgccaagatcgcctacgagaacgccgcctacatcgagaacgtcgtcaacaacgtctggaagttccacttcgtggggttctacaactgctggaacaagttcgtgggcgaccacacgacgcaggcgttcgtgttcaccgacaaggcagaggacgcgagcgtggtggtggtgtcgttccggggcacggagcccttcaacatgcgggactggtccacggacgtaaacctgtcgtggctgggcatgggcgagctgggccacgtccacgtcggcttcctcaaggcgctgggcctgcaggaggaggacggcaaggacgccacgcgggcgttccccaaggccgcccccaacgccgtcccgggcaagccgctggcctactacgcgctgcgcgaggaggtccagaagcagctgcagaagcacccgaacgccaacgtcgtggtcaccggccacagcctcggcgccgcgctggcgaccatcttcccggcgctgctggcgttccacggggagcggggcgtcctggaccgcctgctctccgtggtcacctacgggcagccgcgcgtgggcgacaaggtgttcgcgggctacgtgcgcgccaacgtgcccgtggagccgctccgggtggtgtaccgctacgacgtggtcccgcgcgtgcccttcgacgcgccgcccgtcgccgacttcgcgcacggcggcacctgcgtctacttcgacggctggtacaagggccgcgagatcgccaagggcggcgacgcgcccaacaagaactacttcgaccccaggtacctgctgtccatgtacggcaacgcgtggggggacctcttcaagggcgccttcctgtgggccaaggagggcaaggactaccgcgagggcgccgtctcgctgctctaccgcgccaccggcctgctcgtgcccggcatcgcgtcgcacagccccagggactacgtcaacgccgtccgcctcggcagcgtcgcctcggcgtagcttttggattgcatgttcgtttccatgcatgtgtatcattgcatgcaataattggatgaaataaacagcaacaagcttcatcagtattattattgttgttgttgaatatatgcatcctctcctctctatatagaattatagatacatgaggcctggccggccgcgcacgttgctgaacagttgaagcgcttcccaaaaaaaaatgtatcaactgtgaagcatatatatcctgaaaaaaaaaaaaaaacgaattttttgtttttagccctttttgggataaaaatttacaattagacccggaaaacttatatgcattttttgactc

SEQ ID NO: 4945 - DNA, 2162 bp, Zea mays
cccatgcgtccggaaggcgcatgccacggtccccatccccaggaaggcgcaggctacggtccccatcttcaggaaggcgcaggccacggtccccatccccaggaaggcgcaggccacggtccccatccccaggaaggcgcaggccacggcccccatccccagaaagacgcagaccacgatccccttccgataaggacagagttgcgcactcaagggggcaagaacaaaatatagatgatatttccaccgaggccgccgggatcgttggcaataattccccagattctgagcatagattgtcaaagtccttgaggcctcctaactatgaagaaaggaattccacacgtgacagttcttacaagaactcaggcaaacctatacctagtcagggcagcacagatacaagtggagatgaggaacacagtcgtgctagagaaaatgcccggaaagcaaattcatgtcgtaggaaaacaaaggatctctcggcaggtctgcaacctaagaaaatcagtgctggtgactcaagccccagagacaaatctccattcattttacaacagagtggcaaggtcgtccaaaagaaacaccccgatcaattgtcagaatcatcagaagatgagcttgctggtagaagaacaaagcatcaaactgattcacctgatgattctcgtcgaaaacagcattccccgactagaattgaaaatgatgagtcttattcaaagggtggtagaaacagtgagcatgtcatgagaggtttgcgtgatgattctgatgatgctattgatacaaagaaatatttgtctaaagtcaatgaggactcccaatcggacgatggaagtcctttgaaaaaaactaagaaaaaaacagatggtaataggcacattgattctggtagttcagggtctgaagagcctgacaaacatagaacccactcggagaagcgaaggcacaagaaaactcataagcataagaaacagtatgatgatagttccgagtctgattctgagccagatggcaaagacgcaaagaggaggaggaggaaggaagagaagaggctaagaaaagaggaaagacgtcgaagacgtgaagaacgacaccgcagaagggcagaacgccatgccagcaaacgaaaattaaagaacaccgatactgttactatgccttcagactctgagaaggatcgggattctgattcagatggtgatgttaggaaaagagtttcaaacgctggaagagaagagtctgatcagaagaaactagaaattgaactccgtgagaaggcccttgaatctcttagagcaaagaaagccatcaacaactagactgagaaattttttgtgacacatttgagtttctattttcaagtggaagtgtccttatatgaaactatttaatgttctgtgtgtttatgtggcagttgatctgatgattcctgagctgtttacttgatgcagctgaattcaggcttagcagccagttatctggtaatgtttgcttctacagatttgtacgcgaaccataaccctgaaaaggatatgttttgttatgtgagcatctgcttccttttttttcattgtgtgaaatgctcgtctcatgtttctttactagtgtatgatgttgtgttatcgcatacgctgttaaaaaataaccttgcacaatatctttacttgtttattggaaagaaataataataactaagaccaagtactgaatctgaatgtgggcataattgccatgtgcttgctgcataatgctactcttatttattttttctttcacttttgtggacacttagctgctgtatactgtgccactttgttgatttgaatttgggttattggcagattagctccatgtgcacaagctttttatgttcctcaggatgatatgatcaacgcctcaacaaaaacaagttggtaacatattgattggaaaattctgctaaagcattccttcttagtttcaggtttgtgcagcagtcaatattatctgattaataggttctcatatcagaaaacaatttcaggcactcgataatttacgatgcctagggggctagactgatattaatcattactttcagtaacttatttatgatattgactgaagaaaaagaaaccctgtgccaccttctttcacatatggaatcagcaaaccagggg

SEQ ID NO: 4946 - DNA, 1781 bp, Zea mays
  misc_feature (1750)..(1750): n is a, c, g, or t
  misc_feature (1758)..(1758): n is a, c, g, or t
cccgcacaagtcacaacagaacgtccctcccccacaagcagaaggatccgggcggccaccgagagtcactggaagaagctcgtccggcgccccgcgacgagacgacggcctcctcctccgctccgctgaagaacgacctccccgctggacagggtcgcgaatcgcaatctccttccctccttccctctctcttctcccccaaggccccaactgggtcgaccgcttttccgaacccgtgcggccagttactgttcccatcttattcttttggtgcgtgcctggctgcctgcctgccaccgccatcaccaccacgcgcggctcatgtggcgtggcgcagaggcggagcgctccgcagaggcgcagagagaggtggcgtctgccttgctgcgctgcgggtctgcggtctcctgcagattcccgcacccacaaggccagaggcgacccaccagcgccacccaaaaaaggcgcacccctttccgccgcccaaatctccctttaccccgatccccaagccccgccgctgctccctcgtacgcacgtacgcaccgcgtcgccctttatctgctcccgagggccgctggtcggctgctgaatcgtcgccgttgttgctgggactgcagcgttggcgggccttgtagcgaggagggggtgcggaggcgccgcgactgttcgcgggatgagcttcggcggcagcagctccctcgcatcaggtgcgaagaggccgttcgagtacgggagaacgcatgtggtgaggcccaagggcacgcacaaggccaccattgtctggctccatggacttggggacaatggagccagctggtctcaactactggaaactcttccccttcctaatataaaatggatatgccccactgcaccttcaagacccgtgtcagtgtttggcgggttcccctccacagcatggtttgatgttgctgatctttctgaggatgctcctgatgacattgagggaatcgatgcctcagcagcacatgttgcgaatttgttgtcaactgaacctgctgacatcaaacttggtgttggcggctttagtatgggtgctgctactgctctgtactctgcaacttgctttgcccatggaaaatatgggaatggcaaaccattccctgtgaacctaagtcttgccgttggtcttagtggctggcttccatgtgccaggaccttgaagaacagaattgaagcctcaccagagtgtgcacaaaaggcttcatcaatacctcttttgctctgtcatggaaaagctgatgatgtagttgcctacaagcacggggagagatctgctggtgccttgaaggcaaatggcttttccaatgtgctcttcaaggcatacaatagtcttgggcactacactgttccagaggagatggatgaagtttgcaaatggatcacagcaaatttggggcttggcactaagtcatcttgattggaatttgatgcgagaaagactcgcagggacggtgtccaaataataccggtatcttttccaggaggtatatggtttaatagcaaatttgggcttgggtatacggccatgttctagcttttcttaacgcagacgtgtctgcgaatgatgtatgcttataatatctatattttggtctacgtcgatttggttgtggcacggataatgtttgtttcaaatattctgctctgcgaattggaattgtgatgttttgctttcacaaaaaaaaaaaaaaaaacgagactagttctctcctcgtgccaaaanaaaaaaanaaaaaaaaaaaaaaggtaccttg

SEQ ID NO: 4947 - DNA, 3057 bp, Zea mays
aaaaaatagcctattccattagtaagattccaattcctcaaaatgaaaggaaacaaacaggacataagggaaatgccttgttaacatagctatagctttctattaaaactacacttagacttgaagcacaagcagtaacaagtaacaacagaatttctgtcagtagtcatgttataaatcaaacatcaagtaacttcgtttggtgatattgtctgttagtgttttattataatctgtctggtcataatagctaatctaagaattctcttgttctcttttaactttgcaacagattgatgcttcaaatccttttggggatcctacacctttcaaggcagttcttgatgaaagtccagcactacctcagacacatgctgcaccagctggttctttccaacccactgggtacctcgtggccggccggggtgaaccctttccagcctgcttcagccgcaagctttggttttggagacactcttggtgatctcacttttgcaccaaatgctgcacctgagctgcaagatatgtttgcaaacacagcctccttgccttcagaggtagcaccagcaaacccatctgtggttctccaacagccagttcctactaatttctcctctcaggtatctcagccagttgctggcacattgcatgctgctcctacagcatttgctccttctcaggctcctcccacatcatttgctcattctcaggcacctcaggctgcccctgcattttcttattcacaagggcctcatcctggtgctgccatccagtctcaatttccccagactgtcgccccatcatttcctccttcgcaggtgcctcaatctgtaacacccaatctgccaccaggccaatcgaacttttttttgcaatcagcatcagggtctggtattgacagcctgtctggggttcctacccagaatggagcaccatcctacattcccccacagaattctcagttcactgctccggcaaatcaacaaccattgcagccaagcttcatcccacaaactagcacaccagcactccagccggccttgatctctaggggggcatcccagccccttggtgtgccaaattcagtgcctactagtggcagcttcccgttgcagtcaagttcatcagctcccccagaaacaatcgtttctgctttgcaagtcaatcaaactgagccagtgaagaagtttgagcccagatctaaactgtggtctgatactttgagccgaggtctagtcaatctggacatttctggacgtaagtggcctgtcgtcgtttacttttttcccctgcaatgccaacagcttacctttgtgttggctgaccccattgcgtatgttttttttacagcaaaagcgaatcctcatgctgatattggagttgactttgattcaatcaatcgcaaggagaaaaggcaggaaaagaaaatcaaccaagcacctgtggtgtctacagtcaccatgggcaaggccatgggagctggttccggcattggtcgggctggtgtaggtgcaatggcacctcctcctaaccaaatgggtgccgggaggggtatgggtcctggtgccggtgccggttatggtggtggaatgggaatgaaccggccaatgggcatggggatgggaatgaatcaacaacagatgaggatggggatgaaccaacaaccgatgggaatggggatggggatgaaccaacaaccgatgggaggaatgaacatggggatggggatgaaccaggggatgccgatgcgtcctccaatggggatgggtcctggtggaatgcccggtgctggctacaatcagatgggcgcggcgtacggtggccagcagccatacggtggatacaggtgaggaggggctatgcagtcccccacaccacagatttatgggggcgaggtgttgaagaaacggttttggaggcatctgtattttgctcacctggttttgctttgggtatgatttcttgtttcttttgggggtggaggtgagaagggtataattttcgtcactattcttttacagtctatgttggatactgtacctactttactaaatagcaaaaagcaaacatatgaacaagggcggtgctacaactactgcgttgtgttggatgtaaagccttgatatattatctctttcccatgtagttgtggctataggcggcttcttttcagtgaacatattgtctgttccagcgttcttgctggatggatagtaaatggctgtaccatttggttgaattatcatggtttttgctttgatgttagtttgcatgtgaaatttgacatgctttgttcacatcgttattcttgtatcagttactatcgaggaactaaccgcaatggcttagatctagctggaggacagtcgtcattctgaaggaacaaagatcggtcaaaaactaggtcaatttggctaccgaagattgggacgaaaactttgtgcgggagcctgagacatttttgggagaggacttggtagaatgaattccacctccgtctttaaataaatcaacccaaaacccattcatgcaagtcaaactatcttaaaataaatcacctcaaaatccatacaagcaagtcaaactatcttatcttaaaaataaatcaactcaaaatccatacgtgcaagtcaaactatcttaagtttaattaaatttacaggtcaaacttttacaaattttacgtgaaagagagccaccatctatgatataaaacgagtatattataaaaaatatgttctatggtatatataacacgaaagcatctagtccctaatttgatttcggtgattaatggcgtatgttttatagaaacaatgtaaattaggtcatactgcctccatcccataaaatatggcatattttttttttgcaaaatctttagagtgaaacttagacaagtatttttttaaaaaaatacgacattaacaaatataaattgagcatcatattaaagtattttaaatacaaattcaagtatataagatgtatacactattttttcttgaattattagtcaaagttttgaaatgttgacttttttaaaaaccatgtacg

SEQ ID NO: 4948 - DNA, 1201 bp, Zea mays
ctcccgcccggccggcccgggccccgcccccgataggcccgtccggatagtgccaggactgccagcccgatctcgcgtcgaacgatgtgaaagaactcctttcttctacgcggacggattcctctcgtctcgatcagctcgcttcgtgacttctctctcctctcgatcgattgcttcctccaccgaggcgggggaaagcgccgcccagatcgccgtaggcaagcggcgatcactccagctctgagcataagtttctgcagggaggctcgtgaagtcagtagtcgtatctggcagtggcagcacagcgcaccatggaatggctgagctggagaacggtgtgttgtttatcagtgctgtgcaccgtgctgttcttgcgcccggtcgagggcattcgcttcgtgatcgatagagaagagtgcttctcgcataacgtggagtatgagggggatactgtccatgtatccttcgtcgtcatcaaggctgacaccccgtggcattacagcgaagaaggcgttgatcttgtggttaaggatcctaatggcgctcaagtccgtgattctcgagataagactagtgataagtttgagttcatagttcagaagagaggcgtccatcgcttctgcttcacgaataaatccccgtaccacgaaactatagacttcgacgtgcatgttggccatttttcatacttcgagcagcatgccaaagatgagcattttgcaccacttttcgagcaaatagccaagttagatgaggcactttacaatatccagtttgaacagcactggctagaggcccaaactgaccgtcaagcaatattgaacgagaacatgagcaggagggcagtccacaaggcactcttcgagtcggcggcactgatcgcggccagcgtcatccaggtctatctcctgcgccggctcttcgagcgcaagctggggacgtctagggtataaggctccactggtatccaactctcccttgtagtagccaccatgatcgtatcgacataaccgttaatggtcgctagatcagctaatactgcttccttgtgggctttagttacatgtaatcttttgtggtgccacagatgagaactcttcggatttaaaccgtcaatctttcagccttcattttgtcaaaaaaaaaaaaaaaaaaaaaaaaaagcaacaaggctccctgtacagaataggagattttcttc

SEQ ID NO: 4949 - DNA, 1432 bp, Zea mays
cattgggtaccccggccgggccagcgcagcgcaacgcaaacccagacggcccgccagacccagcggtcgcttactcgcatcgcagcgcactcgcgccacagtcggcatcacagaccagatccctgcgggtgcggcggccatggccgagaacttccaactccagggccggcacggcaagtcccgcgtccgcgtctcccgcgtctggcgccgcccggccgcggcggggggcgacgtcatcgttgagtggaacgtcgccgtcagtatcgtctccgactgcctcccctcctacacctccagcgacaactccgccatcgtcgccacagattccatcaagaacaccgtgtatgtcaaggcgaaagagtgcacggaagtggtgtccatggaggaattcgccgtgattcttggaaggcatttcacctcgctgtaccctcaggtttcagaggccacggtgactatcgtggagcgcccatgggagcgtgtgactgtcgacggaaagcctcattcgcatgggttcaaagttggtgttgagaagcacagcacagaggtcattgtaaaaaaatctggaagcctgcttataaattctggaattcaaggatactcgctgctaaagacaactcagtctgggtttgaagggtttgtgacggatcgctataggcttcttcctgatacaagggaaaggatagtagcaacagaagtaactgcttggtggaggtatccctttgaacatgtttcgcagctcccatcgaagccattctgcttcacgcagagataccaggacgtaaagaaagtccttgcagagacgttctttggtcctccggatgttggtgtgtatagtccatccgtacaaaatacgctatacctcatggccaaggaagtccttacaaggttcccagatatatcgtcagtccagcttagaatgccgaaccttcactttctgcctgtcaacttggggagcaaagaagctccgctggtgaagtttgctgatgatgtgtacctgccgacggatgaaccacacgggacgattgaagcaaccttaataagccgtcccatgtcaaagctgtaaaaaaaatgtagtcgtcaggctggtattagactcctgcttcgtctccccagcatccccaggcttaaaatggacagtaagctgtaagggaaagataaactgtcataaatcgtagcccctatgctttatgtgtggtggtggtaataagtgcacagacttgtattggatgttgtcagctgtagcctgtaggcgtccagcttgtgacgtttcgccactgtaatcgtgtacattgctcgtcttgtgtggaaaccagttaatatctttggaagctttggtcagttttacataaaaaaaaaaaaaaaaaaaaaaaaaaaaaaaaaaaaaaaaaaaaaaaaaaaaaaaaaaaaaaaaaaaaaaaaaaaaaaaaaaaaa

SEQ ID NO: 4950 - DNA, 2048 bp, Zea mays
cctcgaggccggccgggaaacaaaaaatcaatgagcaaatacatcgaattgcgcgaaggcaaagcgtccaagcaaccacttctgctctgcatcccgtctgggcctctgcatttgcttggctgctgctcccttctcccaccgaccaactcgatcccgcgccatggatcgcgccgaccccgcgcggggccgccttgccgtgctctcctcccacctccgtggtgcaggggccgaggaggcggcggggctggagaggtcgccggtatccgcgccggcgcccgggccccgcgccggcgcgcttgccgtggtggacgggaggaccgggaagcggcacgaggtcaaggtctccgaagacggcaccgtgcgcgccaccgacttcaagaagattaccactggaaaggacgacaagggtcttaagatttatgatcctggttaccttaacactgcccctgttcgctcgtccatctgctacatcgatggagatgagggaatccttcgctataggggttatccaatcgaagaattggctgaaagcagctcgtttgttgaggtggcctaccttttaatgtatgggaacttgcctactcagagtcaattggcaggctgggaatttgctatttctcagcattctgctgttccccaaggactgttggatatcatacaatcaatgccccatgatgctcaccccatgggtgttcttgccagtgcaatgagcaccctttctgtctttcatccagatgcaaaccctgctctacaaggtcaagatctttataaatcgaagcaggtgagggataaacaaattgtgcgagtacttgggaaggcaccaacaatagcagctgctgcctacttgagattagcaggaagacctcccgtccttcctttaaatactctatcttattcagagaacttcttgtacatgctggactctttgggtgacagaacatataaaccaaatcctcgacttgctcgagctctagatattctttttattctgcatgctgaacatgaaatgaactgctccactgctgctgttaggcaccttgcttcaagtggtgtggatgtatttactgctctttctggtggtgttggagctctatatggtcctctgcatggcggcgcaaacgaggcagtacttaaaatgttaaatgagattggaagcatggaaaatattccagatttcattgtaggagtgaagaacaggaagaggaagatgtccggttttgggcaccgtgtgtataaaaactatgaccctcgtgctaaagtcataaggaaattggcagatgaggtgttctcaattgttggacgggatccacttattgaggtggccattgccctagaaaaggcagcgctgtcagacgaatattttatcaagaggaagctgtatccaaatgtggatttctactctgggctaatttatagggcaatgggattccctacagaattttttcctgtgctgtttgctattcctcgcatgggtggctggctagcgcattggaaagagtcactcgatgatcctgacactaagattataaggccccaacaggtatacaccggcttctggcttaggcactatacccccgtcagagaacgagtgctatcaagccagagtgaggaacttggtcaggttgccacctcaaacgcaactaggcgccgccgtgctggttctgccctgtagaagctgcagcgtataaacgcaccggcatactcaataaacatcgaccacttttgtgcttgaaaaggccacaaatgctttttagcttggttggagttgtaggccttttgttgtcgagtatataggcaataatgcagtgagaacaccacaccgttacaatgtaaaactgtcacgaggcatcacttgctggtgtacaccccttgcgttctctatgacttaatcacttaacttcccaaaagatgaattaagaggtacgatcgagtacccgtgttcttgcgttgaaaaaaaaaaaaaaaaaaaatgagaggtggtggggcacccgccccgagattagtggaaacaaagattcgctgttggcgtaaaaaaaaaaaaaaaaaaa

SEQ ID NO: 4951 - DNA, 2125 bp, Zea mays
ttgggaccctcgggccggccccaattacccgccttccgccatctgacgttctagggtttggcggctcctctatcctttctccatccgctagcaggcgcgaggcgccccctccgaccgacactgaatcccgcctccaacctccgctcgaaacccataccttcggtctcctccgtctgtccgtcgcccatccggccgcctcttctcccaccagccgccgctgccgcacgttagctcctcctgcatcgtcgccggacctccgctacgcccccgtgcatccttgccttggcaggcaggatctggccacctttcgccggcaacagttgggcgccgcataggtaaccgcctacccccgaggcaaggcagtaccccgtcgcccagcgtataagcgcggaaggagggcgcggaatagcgccttttctaacactaatggcaacggcggcggcggatggcccccctgtggaaccgcagtctctgaagaagctgagcctccggtcgctcaagcggtccctggacctcttcgccccggcgcacgccctcctcttcacgcccgacgccgagagcaagcggattcgtactgggtgcaaggtgagtgcggagtacggtgcggtgaaggacctcacgccggagcaggggcgcggtgggcagggcaagggtcctgcgccgccatcttcaacagctttggcattgccaggaacacaagatacaaaagatgctcacggagaaggctctaggaatgccattgtccctgcaccacttatgctgccaaaagcacctgaatctaccatacctggcaaaaatacaactctgtcaattcctggatcatctgacagattttctacatccgcactgatggaaaggatacctagtagatggccacggcctacatggcatgctccttggaagaactatcgggtcatcagtggtcacttgggatgggttcgatctattgcatttgatccagcgaatgaatggttctgcactggttctgccgataggacaataaagatatgggatcttgcatcaggaaccctgaagcttacactgactggtcatattgagcaaattcgtggacttgctgtcagccaacgtcacacttatttattttctgctggtgatgacaaacaagtaaaatgttgggatcttgaacaaaacaaggttattaggtcctaccatgggcatctgagtggtgtttactgcctagctctccatccaacaattgatatcttactgactggtggccgggattcagtttgcagggtgtgggacatcagaacaaaagcacatgtttctgctttaacagggcatgacaacactgtctgttcagtgtttgctcgtcctacggatcctcaagttgttactggttcacatgatacaactattaaattctgggatcttgtagctgggaggactatgtgtacccttactcaccataaaaagtctgtccgagctatggcgcttcatccaaaggagaaagcatttgcatcagcatcagcagacaacgtaaagaagtttaaccttcccaaaggcgaatttctgcacaacatgctgtcgcagcagaaaacaataatcaattcaatggctgtaaatgaggatggtgtcttggcaactggaggggataatggaagcctgtggttttgggactggaagagtggtcataactttcaacaagatcagactatagtccagcctggatcactggagagtgaggcatgcatatatgccctctcatatgacgtgagcggatcaaggcttgtgagctgtgaggcggataagactataaagatgtggaaagaggacttgacagcgacgccagagactcatcccatcaatttcaagcccccaaaggacatccgaagatattgatgctcaaatcccacaagtagcaagctagtggatggttggagcctccacaattgtgtgacccaaactcgcttcttccctgagcccaattgaaattttgctagggtttgctctattgtataatctgatgcctgtactccaccagtctgatgccttggtccaacgctttgaaacccttagactgtttctttgtgatctttgcgttcgatttgattataacctaccttagtaccaaaaaaaaaaaaaaaaaaactcgagaaaaaaa

SEQ ID NO: 4952 - DNA, 1867 bp, Zea mays
aagtagtacgagtaaccaacaatccaatggacgcggcgaaatattggcacccggcagcacacccccaccaatcccgtgtccccacgatccagatcagaaacgcaaaggacaatcgacacggacgcgacgcgaaggcgacgcaccagcaccacctaaaattctaaaaaggcaggggccgtttctccgaccaccgcccgacgaatcagcgcgtccgctacaactccggcgacccccgccggcgacgacccaccagggcagcgatccacgcaggcgaacaacgatgggcggccgcaagatcgcgctgctggtgggcatcaactacccgggcaccaaggccgagctcaagggctgctacaacgacgtcgaccgcatgcgccgctgcctcgtcgaccgcttcggcttcgacgaggccgacatccgggtcctcaccgacgccgaccgatccgcgccgcagcccacgggggctaacatccgccgcgccctcgcccgcctcgtcggggatgcccgccccggggacttcctcttcttccactacagcggccacggcacgcgcctgccagccgagacggggcagcacgacgacaccggctacgacgagtgcatcgtgccctgcgacatgaacctcatcacagatcaggatttcagggaactcgtgcagaaggtccctgaaggttgcctattcaccatcgtctctgactcatgccatagtggtggcctgctggacagtgctaaggagcagataggtaatagcaccaagcagaataagacccagtcccgtgaacctgatgagcctcgtcattctggttctggcagcggcttccggtcatttctcaaagagactgtccgcgatgtgttcgagtctgaggggattcacatccctcatagtcgtcgccatggggatgatgaccaggacgacggttacgcacagccaactggaaatggccgcaccaaaaaccgctccctgccactctcgaccctgatagagatgctcaaggaacaaactggaaaggatgacattgatgtgggttctatccggatgacgctgttcaacatctttggtgatgatgccagcccaaagattaagaagttcatgaaggtcatgctcggaaagttccaccagggccagtcaggtgagcaaggcagtggtggtggtggtgtctttggcatggttggtgcccttgctcaggagttcttgaaggctaagcttgaagggaaggaggaagaggctttcaaacctgcattagagcaagaggttcacagtgttgacgaggtgtacgccgggagtaaggcctgggcaccaaacaatggcattctgatcagtgggtgccagactaaccaaacatcagcggatgcaactacaccgcagggtgtctcctttggtgctctgagcaatgctatccaaaccattcttgcagacaagcacgggaaggtgacgaataaggatctcgtgatgaaagcacgtgagctgctgtccaagcaagggtacactcaacagcctggactatactgcagcgatgagcatgttcatgtcgctttcatatgctaaaacttggattgttacagcgattgctttcctccatccttttgtgttgatcggtgcaccagaggttgatgtttttcttcccatgtatgttacagctatattgtatcagtgtttgttgcttgaggatatgtttcaatggactatgtcaatattgaaataacttttgagaaatgtttctatatatgaataatatacacacttgtatcgtgatctgtaccaaaaaataagctacactaaacatatcagttttcctacattccgtcgtcccagtaaaaaaaaagaaaaaaaaaaagggccggctcgagcacgagccgaattccgagc

SEQ ID NO: 4953 - DNA, 4764 bp, Zea mays
  misc_feature (90)..(90): n is a, c, g, or t
ggtgattattatgctaatatgaactaaaacataattgattctgagtccgaagcaatcaacaactacacttgtgtcgcatgccaacgtgtnagcattaggaatggaactaaaacaatctccaatcccagtaaaaccaacaaactttagtttctatacaaaacgaaatgccattaactctactgcgaatccgtaagtgacgtacttgggttctgattctgataagatttgtgagcatgtatcatgacaggctacaaagaacatggctgcgatacctaagccctagtttcttgcagattgtatccaaagcctctggcagcgttctatcagcaaaatataggataagagttctatacaagatgcaaccactatattagtgccatgaagaggacaaaacaactagaaatttgttacttgttagctctttcgagtagttctttacctccacatattatgcaaccactatgttagtgccatgtttccagggacgggcccacttcaattcataggcattcaaatgaatacctaagtttttgtcaaaaaataagtatatgtagtatataataaacacatattggttaattgcccatacttcatatgacacatatagacataagctctagtggtggagacaactagggttctaatccccacacctttttttttacctgcgcgtgaaattttccatttttttgcctatgctcgatttgtggatgattgttttagcttgacatttagtccttcgctttttcgtttgtgagtctcatatttaattcagctttcttaaaaactagaattcatcttacagacttatacgatatacgattagggtcgatcagcaatctcataggaatgtttgtttatttcacatgttgctatttgtgtcaatattttctgaaattatataaatagaaacaatgtaattctattattttattctcccattacttatgaacattgttgactggttgctttgttatatttattaaagaaaattcttcttgcaagccaaagataaaacatcatcgctccttttcaaaatatgaaggataaaaaaacttgtcatgtaatgtaactttccatattatttaaatattattatcttttatatatttcaagtgttggctctgataactagtattgaagaattataatttttaatcattttttatgctcatgtaagaattaattttgtttaatatatatcagatgtatactataaaattattgttatgtagtaatatatttcggtagtattgctaggctttatatggtattatatatatatatatatttttgctacttactaatttcaactcgccactgcatgtatcagaccccaccctgttcgtccacggccggtcctgccctactttattgaagaatgaaaaaaatggcaatcatttatatgtaggtctgttctagaaacaaaagagaataatcaaactaaaataatcttgtataaaattgaagctaccgcgtagatcaaacgctttagtgacagatctttagattgactgatagagctgctatatgctatacagtacagattcaatttgtcaagctcttgcaaacaagcctctaaaatcttgcaacgtgcccccggccccgagaatgtctattcggtagcgtacaaagaggcgaccccaccgagcaagcagtgactgaggcagtgccccacctcccctgtttctcgtataaaggtgcccgccggcccccccgcggccttttctgcattcgacgccgccgcaggcccgcagccagctcgagcccaaaggagagaacccaggttggcggcggcgctccggcggcgatggactccccctacgctctccacctcgccatcgccgcgctcgtcggcgcctccttcgccgccgcctccgcctactacatgcaccgcaagaccctcgaccagcttctccgtttcgcccgcgaccagcagcgccgccgcaaccgcctcctccccgaaggcgacgaactggaggacggcgaagaggaccctccgccgcactgggatcatgatcgccgcaccctgcccatcccgccgggcctcccgccgctccacaccggccgagagggtaggccagttgtttctccaggttcgactaaaagagttggacctattgttagaccgactacacccaaatcctctgtccccactatcagtgcatttgatagaattgaagattcagatgacgaggaggatcttgtcccagatgccaagaatgatactgcttacttgaccccaaatggtgctattggatcagatctcacagataaagcgagccagaatggggaattaacatcagcaccatcaacgcagatgattagatcccatagtgcaactggcagcctgcatgtaccccagcttaacccaatagcagctgacgttcctgtcgccgttgctgaacacgtaaccttcagtaaaatcaatatcacagctgttgagactccttctcctgatgaaattgaggcatacaaagttcttcagaaatgccttgagctgcgtcagaggtacatattcagagaagaagttgctccttgggaaaaagagatcataactgatcctagtactccaaagcctaatccaaatccgttcagttatgaacatcaggctaaaaccgatcaccatttcgaaatggttgatggcgtcattcatgtgtaccccaataaagattctaaagaaagactctatccagttgccgatgcaactaccttctttactgatatgcactacgtccttcgtgtgttggctgctggggatatccgaaccgtgtgtcatcaccgtttaaatcttctagagcaaaaatttaatcttcacttgatggtcaatacggatagagaactgcttgctcagaaagctgcacctcaccgggacttctacaatgttaggaaggttgatactcatgttcatcactcagcatgcatgaaccagaagcacctgttgagatttatcaagtctaagttgaggaaggaacctgatgaggttgtaatctttagagatgggacctatttgactcttaaggaggtttttgagagtttggatttgacagggtatgacctcaatgttgatctcttagatgttcatgctgataagagtacatttcatcgttttgacaagttcaatctgaaatataatccatgtggtcaatctcgcctgagggagatatttttaaagcaggataatcttattcaaggtcgcttccttgctgagctgacaaaagaagtattttctgaccttgaagcaagtaaatatcagatggctgagtatcggatatctatttatgggaggaagaaaagcgaatgggaccaaatggcaagttggatagtgaacaatgaattatatagcgagaatgttgtttggttaattcagattcctcggatatacaatgtatacagggagatgggcacaatcaattctttccaaaacctccttgacaatatttttctccctctttatgaagtaactgttgacccagcttcacatcctcagctccatgttttcttaaaacaggttgttgggttggatttggtggatgatgaaagcaaacctgaaagacgcccaacaaaacacatgccaacacctgagcaatggactaatattttcaatccagcctatgcgtattatgtgtactattgctatgccaatctgtatacactgaacaagcttcgtgagtccaagggcatgacaacaatcaaacttcgtccacactgtggggaggctggtgatatcgatcaccttgctgcagcatttcttacttcacataacattgctcatggggtgaacctaaagaaatcccctgtacttcagtacctgtattatcttgctcagattggtctagcaatgtctcccttaagtaacaactcactgtttatcgactatcatcggaaccctttcccaacatttttcttaaggggtcttaacgtgtctctttcgactgacgaccctctacaaattcacctgacgaaggaacctttggttgaagaatacagtgttgctgcttcactttggaagctgagctcatgtgacttgtgtgaaatcgctagaaattctgtctaccagtccggattctctcacaggctcaagtctcactggatcgggagaaactactacagaaggggtccggagggcaatgacatccaccagacaaatgttcctcacatcagggttgaatttcgacacactatctggaaagaagaaatggagctgatacattttggaaatgttaacctacccgaagaagttgacaggtgaagagcaggggaattgcagtgaagtctggcggtggcggcaaggggacgagagaatgtgtcaacacgagagactcgtttgcttgcagaggaggtatcatgacaatggatgtcgccaagtcctccgtgtcgaccatatatatatgaagaataataagaaaacacaaatacccaagtatttagaagcgttgaatccagatgtggcatgaggtcggagccaacgtgtacttgcatacgttacgtttatatacatgtactgctctgctgtaatggtgtttcgacgaatgtgtcttgtcattaatgttttgttaggctcgttccaggcttctgctgatatatacgttacgttcaggcccgaactaggtttgggttttcgctttcgctactcgtaggaaatgtttaagtaccggacttcatgctatagggatactagctcagatggctcagattttatgtccagccctattatttatagatcagattctagtttttctttttttaaaaaaaccacacaac

SEQ ID NO: 4954 - DNA, 1286 bp, Zea mays
aagcgtttgctaccacctgggcggccggggtttccatcccattttctctcctctctccgtcgccgcctcgggccaaaccctacgcagggagttgattgatcgattgcagccatgagtaagttgcattccgagcttctcaaggattgcatctcccagatagttcaggatgccaagaagaataggaagttcactgagactgttgagcttcagattagtctgaagaattatgatccacaaaaggacaagcgtttcagtggctctgttaagttgcctcacatccctcgtccaaagatgaaggtgtgcatgcttggtgatgcccagcacgttgaggaggctgagaagatgggacttgactacatggatgttgaggccctcaagaaaatgaacaagaacaagaagcttgttaagaagcttgccaagaagtaccatgcttttttggcatcagagaccatcatcaagcaaattccccgtctccttggtcctggtctcaacaaggcaggcaagttccccactctggtcactcaccaggaatccctggaatccaaggtgaatgagacgaaggctacagtcaagtttcaactgaagaaagtcctttgcatgggtgtcgcggtcggtaacctgtctatggaggagaagcagatccaacagaacatccagatgagcatcaacttcctcgtgtctcttctgaagaagaactggcagaatgtaagatgtctctacatcaagagcaccatggggaaaccattcaggattttctaagtctgtttttttgtgaagtctgctctttatgatatttggtttttgaaccgaggttgtcttgaactaaaactcttgttagatcatgtttggttggtaggatatttgagtctgggcaggtgtcttactcttgcgccatgtctttgtaatctctctatataagttttttgagaggctcagtataatatgcgtattatacgttatacccaatcgtttctgttactgtggaaaatgagtttccgccattgctgctgcgcccttgggtagcgcccctctacttacgggatagagccttgtaggaagtttttggtcactaatctggctgctattactagacattttgtgtaaagcgcaggcctagtgtcttaggttcttacgtgagttgggttaggagaagggattaacctggtgcttttgagtccaggtgctaggatttgaagggtcagtgaggtttggatagcctagtgtctgatggctatacatactatatttataaaaatattgtgtgatgattaaaaaaaaaaaaaaaa

SEQ ID NO: 4955 - DNA, 964 bp, Zea mays
ccggccgggaacggaaggcctgcgctccacggaccacggcaacggggctcgggagggggtaccccggggcggcccgcattcacatctgtagccgcgcctctccgtatcactccgcgcctctctcccgccaggccgccgcccaagcaaccatggtggccgcgctgctccgccgcgcgctccacctccgccgtgtgctcccctcgcccgccgtcaccgccgccgcctcccagcgcctcatccccgccttctcgaccacccccacgccgaccccgaccacctcccagcagaacgccgccaccactacgatcgacctctcctccgacgagagccgccgccgcctcctcaataggttggtgtaccggagcaagcagcgaggttttctggaactggacctggtgctggggacctgggtcgagcagcacgtgcacgccatggacgaggccaacatccgcgccctcctgcaagtgctcgacctcgaaaacccagatttgtggaaatggttgactagccaggagcagccaccagaggatctgaattctaatccggtgtttgctgccatcaaatcaaaggtcacagataacctgaccaagcatgcttctcctgagacccgatctacaccaggtcaaccatgggttagaggatgggacgacataaagaaaggcaaagatggacccaagtatggaaatcagtgataagctgcttgaaatggggatgacggctttccatcctaaataatagctgtccgcccaccccaccccccaatatgcttgttttgtgattgtgtagaataaagtgaactgccaccggcatgtgtgaagtttgttaaattgtagaatcagcttgtaactatggatggtactcctgatgtttgcctggcaattccagccttccaggtatcgtctactacttggaaatatgttatattatgcattgcagtctgttagtgatggcaatcgttgaagcc

SEQ ID NO: 4956 - DNA, 1972 bp, Zea mays
gggacctcaggcggcggagacaacccaagttccaccagacccacacgtttctttaccctaaccttttcgctgctccagcgaagaacacagccaccgccgtttcttcgtcttcctcgcagcgccggcgcgccatctcggtacgaaggcgacggcggcggtgacggcggcgttcaggatcgggatctcagcgacgacgtcagaggcttcccatcccgacccccgccagtcgcctcgcgccctcgactccggactccggtcctccgcacaccggccggttaccctgcgtttgaacctgctatagaaattataaaatggccgcggttgatgcgacaaccaaggagatggatgcactgcatgttggacaaaatgatgaaacaaaagagagactgattaaagaagacaaagctgcaaacagcaatcattctgttgttgcagctcagtccttgccaccagaggacgacgatgatgatgaagcacaagctgatggtccatctcaagatggagcagcagcagctgtaaagaagaaaaagaagaaaaacaaatccaaaaagaagaagggcccccttcaacagacagatcctccatcaatacctgttgatgagcttttcccctcaggagaatttccagagggcgaaatccaacaatacaaggatgacaatctgtggagaacaactagtgaggaaaagagggacctggaacgactgcaaaagccaatatacaactctgttcgccaagcagcagaagttcatagacaggtgcggaaatatatgaggagcatcataaaacctggaatgttaatggttgatctatgtgagacattggaaaacatggtccggaaacttatcaaggagaatggactgcaagctggcattgcttttccgactggatgctccttgaattgggttgcagctcactggactccaaatgcgggcgacaaaactgtgctacaatatgatgatgtgatgaagcttgattttggaacacatatagatggttacattgttgattgtgcatttactgttgcattcaatcctatgtttgatccattgcttcaagcaacgagagatgccacaaataccggaatcaaggaagctgggatagatgcacggcttggtgatgtcggtgctgcaatccaagaagttatggaatcctatgaggttgaaatcaatgggaaagttttccaagttaaaagtgttcggaacctcaatggacacagcatcgggccatatcaaatccatgctgggaaatcagttccaatagtgaaaggtggagagcaaacaaaaatggaggaaggggagttttatgccattgaaacttttggatctacgggaaagggatttgtcagggaggacttggaatgcagtcattacatgaagaactttgatgtcggacatgtgcctttaaggttagcaaaggccaagcaactgcttgggaccatcaaccacaacttcggaacgctcgccttttgccggcggtacttggaccgccttggtgagaccaagtacctcatggctctgaagaatctttgtgacaatggcatcgttcagccgtaccctcccctgtgcgatgtgagagggagctacgtctcgcagtttgagcacacaatcttactccggccaacttgcaaagaggtcatttccagaggcgatgactactgattgcggctggaggaggctccctgtaccaggttgtgtgtgtggagcgccatccgtttatggatggactataggacgtgtcacactcggataaatggtttggtcctccagagttcaggatgttgtatgagttttataataactcgctaaagattgtggatgtacaagtagcagtaatacgttttctgggaacatggacattgttaggctatttccagcggggatttcgtccgagtttcaatctcgattaaatgtgttgccacataagaaaatatgataatatggcaagaatttaataagagagtgagttttattgg

SEQ ID NO: 4957 - DNA, 1486 bp, Zea mays
gggaataaaagggctggttgtcgttgtttttcttttcaagatatcatatcatatattatgatctgtagctttaagctgcgacagtacaaacaatatactcaataacatacacaatgtcacgtcttcaaaatccagtgaaagaacggacaacaaatttaaacaatatattggaatctaaaatgtatctcttttcctgtgaagtacaaacagcgctaccttctcagcattctgaatgatggcatgtcttgaatgcgagaaatacctccgatagtaagctcttgctctaactgaccccgtgtagacttcagaacctcattgaattccatataactcgctcgccttgcaagccattgagaatcaagcacctgaaatgctacacagaaaaggttatcgaaagccacaccgtcatcatcgagtagttgaacaaagtgaacaccagcttttgttctcatttttcctgactgtaaatccagcatttgaactaacatataggatatgtttacgccgcctactgcaaaaggatactcccattcagctctcttaccatctgctttatgcagtagcctgtgaaaggaatctgggtaatttctggcaaaatatattagattctccaaggacatgaacccagctgctctaaaatctgtggatggatcggagttctgccagcccatctccttccagagatctgacttcagaggaggaagttgtctgttagggtaagccaacttccaaagttctttcagggcatcctgatgcttgacagaggagcagtcatatggcacatctatcctttgtctcaacaatcttaacctttcttcctgtaatggactgaggttaactggaagtgtctgtccattttgtgaacttttggaagcagaagagcaaccaaagagtcttgctagcaaatatccaaattcagaaagaacatttactatgtttcttgcagattgagcaacaaaagctgctaaaagatgtgtccaacgaagacactcctgtgccgtcccatcccagaaacctgaccgtgtaataggctcatatgtcttggatttctcttcctgaggagtgtttcctagaagaggttctgttacaggatctgacagtgctgtatccatttgtttttcccctgttgtatcagtctcagcgctgataggccttctttttatagcttttgaggccatcctagccggttgtatgaatcatgcctcgccgatcgagagaccgaagcggatttggggcccgatttccagtctccgcgcttcctcttcccctccttccgcgtgaggtggcgaggtccgaggagggagatgacagaggaggctgggcgtcagcgattcagagatcccgcacctgcactgcactgcaccgcacgacatctgctgcgctcacggcattttttttcttcttctggggtgtttgtacaaatatgttgcgagacacgttcttggcttcgacgagggaggcgagcactgcacgagcccggccggcc

SEQ ID NO: 4958 - DNA, 3314 bp, Zea mays
cattgggtacctcgaggccggccggggtctataaagtggccgccagaatccgcgcctcctactactctgccctctcctggctcctctccttcctgcttggtttttgctttcagctcttgaaccgaatccactgccgcggcgcttagcattggggactagggggccgacatggctgccttaggggcgaagatggagcgtctgtcgtcgatcgacgcgcagctgcggatgctggtgccggggaaggtttcggaggacgataagctcatcgagtacgacgctctcctcctcgatcggttcctcgacatccttcaggacctccatggcgacgacctcaaggaaatggttcaagaatgctatgaggtagctgctgagtatgaaacaaaacatgacttgcaaaagcttgatgaactcgggaagatgataacaagcttggatcctggggactctatcgtgattgctaagtctttctcgcacatgcttaacttggccaacttggctgaggaagtccagatagcctacaggaggagaatcaagctcaagaagggagactttgctgatgagaactcggcaatcacagaatctgacattgaggaaacacttaagaggcttgttgttgacctgaagaagtcacctgctgaggtatttgatgccctcaagagccagactgttgatctggttttgactgcacatccaacacagtctgtgaggaggtcactgctccagaaacactcgaggatacgcaactgtttggttcaactctactcaaaagatatcactccggatgataagcaggaacttgatgaggctctgcaaagagagatccaagctgcctttagaactgatgagatccgaagaacacagcccactccccaagatgaaatgcgtgctggtatgagctacttccacgaaacaatttggaagggtgttccaaagttcttgcgccgggttgatactgcattgaagaacattgggattaacgagcgtgttccttacaatgcacctcttattcaattctcttcttggatggggggagatcgtgatggaaatccaagagtgacaccagaggttaccagggatgtctgcttgcttgccagaatgatggcatcaaacttgtactgctctcagattgaggatctcatgtttgagttgtctatgtggcgatgcagtgatgaactgcgcatgcgagctgatgtgctgcatctctccactaagaaggatgccaaacattacatagagttttggaagaaggttcctccaaatgagccatatcgggtgatactgagtgatgtcagggataaactgtacaacactcgtgaacggtcacgagagcttttatccagtgggcattctgatattcctgaggaagctacattgacaaatgttgagcagctgttggagcccttggaactatgttacagatcactctgtgcttgtggtgactctgtaattgctgatggaacccttctggatttcttgcgtcaagtgtccacctttggactctcccttgtgaggcttgacattaggcaagagtcagataggcatactgatgtccttgatgccatcactacatacctggggataggatcttaccgtgaatggactgaagaacgccgccaagaatggttactgtctgaacttaatggcaagcgccctctgtttggctcagaccttcccaagactgaggaaatttctgatgttctagacacattccatgttattgctgagcttccctctgacaattttggtgcgtatatcatttccatggcgacagctccgtcggacgtccttgctgttgaactcctccaacgtgagtgtcatgtgaaaacaccacttagagtagtcccgctgtttgagaagttggccgatcttgaggctgccccggctgcattggccagactgttctcaatagattggtacagacagaggatcaatggcaagcaggaggtcatgattgggtattcagactcgggcaaagatgctggtcgcctctcagcagcttggcagctatacaaagctcaggaggagctcatcaaggttgctaaggactttggtgtgaagttaacgatgttccatggacgtggtgggactgttggaaggggtggtggtcccactcaccttgccatcttgtcccagccaccagacacgatccacggatcactcagggtcactgtgcaaggtgaagtcattgaacagtcatttggtgaggagcacttgtgctttaggacactgcaacgtttcacggctgctaccctggagcatggcatgcacccaccaaatgcaccaaagccagaatggcgagcccttcttgatgagatggcagttgtggcaactgaggaatatcggtccattgtcttcaaagagccacgctttgtcgagtatttccgccttgcaacccctgaaacagagtatggtaggatgaacataggaagcaggccatccaagagaaagccgagcggaggtatcgactcactccgagcaatcccatggatctttgcttggacacaaacgcggttccacctcccggtctggctaggatttggagccgcattcaagaatgtcctccagaaggacatcaggaacctccacatgctccaggaaatgtacaatgagtggccatttttcagggtgactattgatctggtggagatggtgttcgccaagggtaatcctggcattgccgcactgtatgacaaactcctcgtttcagaggaactgcatccattgggtgagaagctgagggccaactatgaggaaacccagaagcttctacttcaggttgctgggcacagggatcttctggaaggtgacctctacctgaagcagcggctccgcctgcgtgatgcgtacatcaccaccctgaacgtctgccaggcctacaccctgaagcggatccgtgacccggactaccatgtcgcgctgcgcccccacctctccaaggagatcatggactcgaccaaggctgcggcggagctggtgaagctgaaccctggcagcgaatacgcaccggggctggaggacaccctcatcctgaccatgaagggcatagcagccggcctccagaacaccggttaaaccacgaagaggggatcttttttctcctcctgatcattggctctaggtccttcgtattttcgcggattgtaacttcggccacctctctacaccgtgaggaaataatggtggtttctgcaaaagtggtggtaaataaaagggcgacaactatcttgtttttctcatagtaacttataactttacgatgcgataatggaacatggcttgcgttatctgtttctcgtcaagcatttttgcaggca

SEQ ID NO: 4959 - DNA, 5907 bp, Zea mays
  misc_feature (5347)..(5347): n is a, c, g, or t
  misc_feature (5366)..(5366): n is a, c, g, or t
  misc_feature (5410)..(5410): n is a, c, g, or t
tggatcttaatctgtatatattaaaatgaatttagatgtaaattagtttaagttacacttcaatccatatcattatagattaggatcaataataaaataaccaacgtacatcaccgtgtcggcgaggtgccattacgactacttcgaagcgcttggaaacttcctacgttgtgcccctggtatctctactgtctattgtcatcagttgtggtattatacgagtaaaatctgtgtgcagttgcaggattgcaccctcctcgcagtcccagacgagatccccacagacaaagatgaggaaacaggaattgacagaagcagcaggccgcccccacggcgcctcggaccgctcgcccgcctctgagtcctttccgaggcctacgtgtccccgtccgccccgtgctcgtgcccgcctctccacgtgtaacagacctccccggcttttccgacgtcacctcacctccctccccggccattaatcctcgtcccccccgcagtgcccgcacccacccggttgtcatcgtcagccgctcgctccctcggtcactcactcactcactcactcccctctagtacatcactcaccgcccgccaagcgcgaagctgtcactctgctgaccgcttgacagagcagagcacggcacctagccgccctctcaccgacccatggccatgggcggcgcgttccccttccagtggcccgagggccccgcggatcctgttctcgacgacgtgaccttgcctccgctgcccacggcggcgcccgacgccggggtcgccgcgtactacgcggacgcggcggacgtgcacgcgatgcacatggcgctgcccgatttcgcggcggcgctggcggcgatgcggcgggaggaggaggaggccgcgggcatccgcctggtgcacctcctcatgagctgcgccggcgccgtcgaggcggccgaccacgcgggcgcgtccgcgcacctggcggacgcgcacgccgcgctcgccgccgtctcgcccacctccggcatcggccgcgtggccgtgcacttcaccgccgcgctgtcccgccggctgttccctcccacgccttcgccttcgccttcgcctccgcccccggccccgcacgccgccgacgccgaccgagccttcctctaccaccgcttctacgaggcgggtccctacctcaagttcgcgcacttcacggccaaccaggccatcctggaggccgtccagggctgcaagcacgtgcacatcatcgacttcagcatcatgcagggcctccagtggccagcgctgatccaggccctcgcgctccgccccggcgggccgccgtcgctccgcctcacgggcattgggccgccgtccccgccagggcgcgacgacctccgcgacgtcggggtccgcctcgccgacctggcgcgctccgtgcgcgtccacttctccttccgcggcgtggccgccaaccgcctcgacgaggtgcggccctggatgctgcaggtctcgcagggcgaggccgtggccgtgaactccgtgctccagctgcaccgcctcctcgccgacgctccctcgtcgggcgacgcccgggcgcccatcgacgccgtgctggagtgcgtcgcgtccgtgcgccccagggtgttcacggtggtggagcaggaggcggaccacaacaagccggggttcctggaccggttcacggaggcgctcttctactactcggcggtgttcgactccctggacgcggcgagcggcggcgcgggcgacgcggcggcggaggcctacctggagcgcgagatctgcgacatcgtgtgcggcgagggcgcggggcgcagggagcggcacgagccgctgtggcggtggcgtgacaggctgggtcgcacggggctggccgccgtgccgctgggggccaacgcgctgcggcaggcgaggatgctggttgggctcttctccggggaaggacactgcgtggaggaggccgaggggtgcctgacactgggctggcacgggcgcccgctcttctcggcgtccgcgtggcgcgcggaagagaacaatcagagtgacagcaggagcaggagcagcggcagtgaggagagcaatatcagctgcagcagctagagcgtcgctactttactgtaaattccttcggtgagaggctagtagcggggtttactgtaaaatcgcggtgcccgcgatccaaatggttcgattgagagagcgttggcatcggtcgtaaatggcagactgaaaaaaaatgacatggaattctgttaggcatgtcgtcgttagctgaataaacggcactgaaacagcgtccctggaaaacgccattgcaatgcagtcgtagaagctctagaaacacttgctccctcgtccctcccatggatttgttttagagcatgactggatgcttgcgtggcctgctgacacatcgagcacgacaagatgccctggcatttctgagctggctggttacaacagcaacgagcaatatgtgaacctcctcatctatcgaaagaaaaaaaaaagcaaatccacgaatgcctacatctagccctgtttataaccaggaagaacatgccaaatcaacaaccataccaaatccacgatgcgcccagtccatatgccagggattctattctactacaatataacccacatctctgaactagctctgccacttccatgaaaaaagaatcgatttcagcttcaaaccgcaaggcatctgtctgaagtctgaaccaatgcaatgcaatgcaatgcaatgcggtgagtaatctatacactgccccccacagcgaatcacttgctaccgacgatcctgtcttgctatgttgacgcttggatttgcaccgaccgtgcctgctgctaacacgccagatcggtcgcgcgctgacgaccgttgccctgttcaccacacgataaacaacgcaggacagctagccggctgcgatcgaggccgcctccgcaaaagctctcgcgtgtacggttgcatctgtagctttgcaaagcgcaacgattaagtacatgtttttttaataaaaaaaatgaacttgtcacagtaggatagcagtagcaggagtggcacgtgcggcgcacacgcgcacggcatctctctctatctctctctcgggcggtcacagattctcctgggtgcggctgcacctgcacggctgcacgtcaggggaggcgtcccccgagaagcgcagaaaaagcccaagccctcttgcgagccgtgccgcgactagaacgcaacgcagccaggcaggcaggcaggatcagaccgtctgtatttgaaacacgccgtacgactagttgacgctcacatgtcgtggtaccggcccggtctcaaagtcccgaatcatattaaaaaaacacaaactgctgctaacggggagagttgggatgctcaatggtcagtcgcgatcgcaaccacacagcagaggatcacacttttacatgcagcgcatgttgctaacctagtacgtacgtatcccgtagctctagtacgtggacgtagcggcactctgtggtgtgggtggaagagagcttcggttaccgaggcatgagcaggaggcagagcagatgaccggaccaccgccgcgttcacgagccggccggcgcgatgctgcgcgctccccctactctccgccgcatggcagacggacgggacgggtggctgtcacgcaactggcgcgcgcggccgcagggcctctctgcgctctgaaaggcgcgcggcgcggaccacggcacgttcaggcgtacagccttccagactccatactgtcagtgtcccgtgtgtagggtggtccggcctgggtccgtctctccccggccccggctgcgcgcccgattgttactcaagcgctctaaactcacggatccccaagaacaacgcgcgccgcggctgatgcgttgagcaaagccatgaactgagcactgatttgtctactgtctatacaagcctcattagcacattgtccaataaaataatattgtaaggtcagaatatcaaactggcctattagctcagttggttagagcgtcgtgctaataacgcgaaggtcacaggttcgagacctgtatgggccatactattttattttgccacgtacatttttggttttgtccatctgcccattcatgcatttttttggcccattcaggcccagttttatttccaccatcgtgtttttgtaatgttctcttattttggtccacctgcatggcccgttttttccctacactcttaatgtttccgtctcggttgatgaggtcagttgcggcacctgttccaaatataattcgaaacgtttgagtttagattttttttttctgctaatctagcctacaaactaaccctagaaatagaatgcgtgttttttttcttctgtttttgtctcaggcgttggattttgttcgcctcaagtttagaacttgccatagttgcttagccagttagctccatccatccaaacaaccccgtcctcacagaatgttctgcacttttttctgtgcatcatcgtgttttttttcaatccatttccatctcaattgataagccaagccgcagcacccgttgaaacaagaccattatttattgttgagaatcaaaatgcttgttttctttttgcaaaccaaatctatccgtatatctcctttttgaataagcttggatttccgacattggacaattcagtttgtccgcacaatcgtcacccagcttagaaataagctacagcccacacatcccgttaaaggcatgtacaatctagagcactttgctcgatttttcaagtacaagagacgactaaaaaactgtattatacaatcctaaaccattagaacgttaataaagaccgtgtgtaggctggttcgggatgcgtccgtctctctcggtgccggctgaccggcttggtttgaagtcaaaatagaatgggatggagtcgataccgtatattcgattttttagaatcacgccgccactaaaacctacttcggtgtttatctcgtccctacgtaactctcatccaaacattatataaattgtagttgcctcctccattacactatatacatccaaccaaacacacccaagcgctctacactaacggatggcaagaactgcgcgcgccgcggctgatgtgttgagcaaagccatgaacggagtactggtcgatctattatctatacaagcctcattacttaagtttatataaatatagtaaaattttaaaaacaaattggcctattagctcagctggttagagcgtcgtgctaataacgcgaaggtcacaggttcgagacctgtatgggccattttattttatttttctacgtacgcattttttggtccacctggcccattcaggcncaatgttatttccaccatntctgcatggcctgtttttccccgtacactcttaatgtctccatntcggttgatgagcccagttgcggcacctgttcgaaatataattcgaaacgcttgagtttagatttttttctgctaatctagcctacaaactaaccctagaatgcgtgttttttttctttctgtttttgtctctcaggcgttggattttgttcgcctgaagttgagaatttgcgatagttgcttggcaatggcaagttagctccatccaaacaacccctcaatcgataagccaagccgccgcgtcctcacagaatgttgtacactcttttctgtgcatcatcgtgttttttcaatctatttccatctcaattgataagccaagccgcagcacccgttgaaacaagaccattatttattgttgagaatcaaagtgcttgttttcttttcgcaaaccaaatctatccgtatatctccttattgaataagcttgggtttccgacgttggacaattcagtttgtccgcacaatcgtcacccagctggaaataagtacagccc

SEQ ID NO: 4960 - DNA, 3068 bp, Zea mays
  misc_feature (3061)..(3062): n is a, c, g, or t
ggatcaactcatatcaactgaccgagcgcttgtcaaaaaccaaacagaacaaggacccaggcaaaatccactgacggcaagagataggagggagatctcgtgatttccggtggcaaggttcggttttgatcccaaccccaggttcctcaccccgaggagaaaaggatccagattttcttcctctctagtaagttgcagttcgcggtggcgccgccccccgccgcttcctccgtgttgcgcggttccgatttggagtgagggggagcgcgtgccgtgggattcccgttcggatctacggagtgggcagctttcctgctccaattcggtcggccagcaacgaaggcccttgaatcttgttgatgcgcggccagatgcgggaagcgtactgggagaaggtttcttggaatcttcgtccgggctccgtggagtgaggtccctcgcccgccgggatcgccccgtcgtcctatgggctgcgtcagttccaagcaattccacggcggggacgaccatggggacggcaagccgcgccggcggccctcgagcaactcgctgaagcgcctggttagttacagttccagcaagaggcatgaggagttggaggaggaggatgaggtgggggcggctgtggcggccacgtcctcgagcggcggacgccgcgctgggaatgacgccagcacggcgaggctgatccggaagccgccagcactggtggtcgaggctgtgccggcattgtcggaggaggctgccactttggcggttggtgtagttgatgcagaaagggcggttgctgcagcgactgggaatcggaagcggcctcctgcagatgtacatatcaatggcgcggcagagcaaggactgagtagcgttggtgttagaacggagggggaggccaaaccaaggatcagggacgtgcccaatggcgtccagggggagcatgtggtggcagggtggccgagatggctcacagaggtggcggcagaggcggttcgtgggtggcaacctcggagggctgagtctttcgagaagctggacaagataggacaaggtacatatagcagcgtttataaagcacgtgatcttgagaatggaaaaattgtcgctctgaagaaagttcggtttgccaatatggaccctgagagtgtccgatttatggcaagggaaatccacatcttaagaaggcttgatcatccaaatgttatcaatcgagtcggcacgacgacatcacgcatgtcaagcagcttgtatcttgtatttgaatacatggagcacgaccttgcaggccttgcagctaccccaggcttaaaattctcagaacctcaggtcaagtgttacatgcaacagctactctctggacttgaccattgtcataaccgtggtgttttgcatcgggatataaagggtgcaaatctcttacttgacaataatggcattcttaaaatagcagattttggtctagctacattctttaatcccaatcaaaaacaacatttgacaagtcgtgtagtaacattgtggtaccggcctcctgagcttttgttgggttctactaactatggtgctgctgttgatctatggagtgccggttgcattcttgctgagttgctgtcagggaagcctatcatgccaggacgaactgaggtggaacagttacacaagatttttaagctttgtggttcaccatcagaggacttttgggctaatctgaagttatcccgagctaccatattcaagcctcagcatccgtaccgccgatgtgtgaatgatgtatataaggacttccctactactgctttaacacttctggactatctacttgctgtagaacctgggaataggggtaccgctgcatctgcccttgacagtgaattttttacaacaaagccatatgcctgcgatccatcaagtctacccaagtatcccccaagcaaggaatatgatgctaagcttcgagatgaagaagctaggaggcaaagagcagctgctaaaggacaggaagctgaagctggacggaggaagcaacctcctgcacctgatggtaatagtggattgcagcaccgccgagttcagatgaatcctaaaagcagcagttacaagttcactccaaaggaggatgctgtttctggatttccaattgatccgccagcaagagctgctgcagacaatggttaccctcagcgcgttcctctgatgcaagctggccgttcttcctccactctgggtagatcaagtgggatggatccaaaggcccaaagattccacacctcccaaattgtcactactgagatgtccggccaatctactgcatctgggcagcgaggcaatgctcctaagatgtctaacctcggggaaagtgccaggagacaatatcttcgagagcatcggtccagttcaagatacagtcaactcactgctgcggacccttctgacaggcctgaatggaaccatcaattccaagagcggccatcgtcttcccatcggaaggatgatgctgtggcaaacaaggagcatacggtggtgaacgggacaaagaagaacagaatccactattcggggccattgatgcctcctggagtgaacatggatgagattcttagagagcacgagcgacagatccaacaagcagtgcgaagagcgcgccttgacaagggaaagggaaagcacagcggtgagagagaccagtcggagtcactgctgtgtaccaccgggaatctcagggctgatcgctaagttcagtttgagcagtcatcagaagcaaagaaaacagcatcgaatcccttatattttttcggttcccccgccccaccccaacccccaagcggagaggtttttgttctgccagaaactcaaactcctgatgcggtttggtacccaggaggtgggcagctgccaaaagaaaacctgttcctgtagagatttaccgccccagagtctagcatatgcggtctgaaatattttttccctgaagatttgttggttatccatagtcctcaattgtatatctcaaaagtactcacccccaaaaatgaaaaattgatccatacactcgttttaaaaaaaaaannaaaaaa

SEQ ID NO: 4961 - DNA, 3844 bp, Zea mays
  misc_feature (266)..(266): n is a, c, g, or t
ttgccgtatccgtcatgcaatccgctcgcgcattgccgtcgccggcgatcttcttcccttgcgttgcgtcagtgccgataacagtagcagagtaatgagctagcacgtgaactgctttcacgaaccctagcaaccgtctacgatgacaatcaatgcgatttaccccgtaatagtagcagagtcatgtgccgttcggatccaccgcttcaatgttctttctttttttttttcctttccctttgctcgaatctaaccttgcagcttgnaggcaggagaagcagaagaacacaagcgtcaatggcccacttaaaatatctccaagaagtaatggcggcatggcatgagcgcaccaaacaacggctctcgccatttacagtcccaccgcacagctgagccgagtgatgaataaacttaggccggccgggcaaaggggggttgtgtggccccgtctggcgcctgctgttcactctccaatctccactcccctgcttcccacaccggacaccggagctcactcgaggacgctgtacgagcagcagcagcatacataaggcacggcagctgagctggctcctccacctttctgtccatccatcacagcttcgagactcgtcctccatgggttctggcggcgtcagatggaaggctctgccgctgtgcctagctctcgtggctctgcaagcatgcctccctgctcgcggggcggctcccaagacttacatcgttcagatggccgcatctgagatgccgagctcgttcgatttccaccacgaatggtacgcatccactgtgaaatccgtgagctctgtgcagctggaaggagacgcggacgaccattacgccgcgaggatcgtctacaactacgagacggcgttccacggcttcgcggcgaagctggacgaggacgaggccgagcggatggccgaggcggacggcgtggtggccgtgctcccggagacggtcctgcagctgcacaccaccaggagcccggacttcctgggcatcagcccggagatcagcgacagcatatggtccgccggcctggccgaccacgacgtcgtcgtcggcgtgctcgacaccggcatctggcccgagagccccagctttagcgacaagggcctcggccctgtcccggccaggtggaagggcctgtgccagaccggccgcggcttcaccgtagccagctgcaaccgcaagatcatcggcgcgcgcatcttctacaacggctacgaggcctcgtcggggcccatcaacgagacggccgagctcaagtctccgcgggaccaggacggccacggcacgcacaccgcggccaccgccgcgggcgcgcccgtgccggacgccagcctcttcggctacgccagcggcgtcgcccgtggcatggcgccccgcgcccgcgtcgcggcgtacaaggtgtgctggacggggggctgcttcagctccgacatcctggcggccgtcgaccgcgccgtggcggacggcgtcgacgtgctctccatctcgctcggcggcggctcgtccccctacttccgcgacagcctggccatcgcgtcgttcggtgccatgcagatgggcgtgttcgtcgcctgctcgggcggcaacggcggcccggaccccataagcctcaccaacctgtcgccgtggataaccacggtgggcgcgagcaccatggaccgggacttcccggccacggtgacgctcggcaatggcgcaaacctcaccggggtttcgctctacaaaggccggcgaggtctttcgtccaaggagcagtacccgttagtctacatgggcggcaactcgagcatccctgaccccaggtccctgtgcctggaggggacactccagccccacgaggtcgctggaaagattgtgatctgcgaccgcggcattagtcctcgggtgcagaagggtcaggttgtcaagaacgccggtgccgcgggcatgatactcgccaacacaccggcaaacggcgaggagcttgtcgccgacagccacctcctgccagcagtggccgttgggcagtctgaaggcattgccgccaagaagtacagcaaaaccgccccgaaaccaacggccacgctcagcttcgacgggacgaagctcgggatccgcccatcgccagtcgtagccgcgttctcgtcccggggaccaaacttcctgaccctggagatcctcaagccggatgtcatcgcgcccggcgtgaacatcttggcggcatggagcggcgacgccagcccgtcgagcttgtccagcgaccgccggcgggtcggcttcaacatcctgtcggggacgtccatgtcgtgcccgcacgtcgccggcgtggctgcgctgatcaaggccagccacccggactggagccccgcgaagatcaagtccgcgctgatgaccaccgcgtacgtccacgacaacacgtaccggtcgctgaaggacgcggccaccggcaaggcgtccacgccgttcgatcacggagctgggcacatacacccgctgcgtgccctcaaccctggcctggtctacgacatcggccaggacgactacctggagttcctctgcgtggagaacctgacgccgttgcagctcaggtccttcaccaagaactcgagcaagacatgcaagcacaccttcagctcgccgggtgacttgaattatccggccatctccgcggtcttcgcggagcagccatctgctgcgctgacggtgcgtcgcaccgtgacgaacgtcggcccgccgtcttcgacttaccatgtcaaggttacagagttcaaaggcgcagacattgtcgtcgaaccaagcaccctgcacttcacaagttcgaaccagaagctaacctacaaggtgacgatgacaaccaaggctgcccagaagacaccggagttcggagcgctgtcttggagcgacggcgtccacatcgtccggagcccccttgtcctcacatggctgccaccgatgtgagcttcgtttatttaccgtgcgtttagagcaagcaatggagcaggaacctctgggcctgggtaatcaagccagagatccgttgtgtcgcagcggcagcggcagcggcagaacaggttcactaaccaacggaaaaatactgtcaaagctccacatgagaaccgcctttattcttcaatgtattcatgcttattccaaatgttcagttgccagtttgattgtttctacattaatgagtgtacaagaaatggaagcaaatagtacggaaaatttgctgctagcaggtttagctagattcccaaatggtgacaccatcacaagtgcagagttccttgtagttctctcctacgccggcacttcttgcaatcaccgctgcggcgatgccagggtctgatttgtccttcgctgcatacaaagcaatcgaccggccgttcccaaaatcaactggttttgttactctcaatttctccttcggtcctgagaaatgggcttccccgttctctccagcttctagagttcccaggtcaccaagtggttgtttcagagaggtaaaaatattagttcccaattttgatttgaaggagttacgttttcattgttgaaattggtattccttcaaataatgaaattgatttctcaaagcaggtcacttgaatacactgttgagctcagggttcaaaagatttgtgctttccatgttgaaagtcgaaactgtgttccctcagttgcaacaatattttatttctcaagactgatcactcagctaaatacaacacattctctgaaaccttgataaaacataaaaccctttataaaacataatcagccaacccataagaaattgctaccttatctttcccaatgatggttcagtaacaaatatgctatgcaaatc

SEQ ID NO: 4962 - DNA, 5741 bp, Zea mays
tggattgtttgtacatgttctacagtttgcgatgaacatatttctgtttataatattggccaatcgacaatctggatcatttcttgaatcgtcttgcatttctacatttttctgtagagtcgtcctgcagctgaaacagccccaagaccttcatacccatcttcaaaggcgaaaaaagactgggataaactggaagctgaagtcaaaaaggaggtttgatgaagatcctcacttatatatgtatcgatcttattgctagaacttgggtttatcgaatatgaatggggtttcatgatttgtgtctgcatcaggagaaggaagaaaaacttgatggtgatgctgcattgaacaaattcttccgtgacatctacaaggatgctgatgaagatatgcggagggccatgatgaagtcattcgtacgtgatgtttggcccagctaatactggatttggagccaactgtattttatgtctatactcacgtatccttgcccgtttctccaggtggaatcaaatggcactgttctctcaaccaattggaaagatgttggagcaaagaaggtagaagggagcccccctgatggtatggagctcaagaagtgggaatactaaagtttggactgcccatcttttgtaaatccaggtcttggaaactatgacctaattctgcccacccatagtgccatgagcttgcttggttaagtctctgcttttgtaagctttctgtatgacagtctagcgtgtgtctgagtgctacttgccgtagcttttgatggacataggtatgctattatgtggtatcgaccccgaaccatctgtggtatcaaagacagcaaactataatgtatggaatgcctattctttttggtctaagatgtttttcttgtcagcgtagtgtgatcttcacaactgaataatagaaactatgcagggacctatgttacagtggtccaccgttggcacagttgcatttgcgtctctttggtggatgaattgaatttatgggaaaattgatttctacctggcatttatgcatcggcgttttacttggtttcaggtttcaggtatgttgcctggttcatgcgctcaatacagccaggtggcacctgaattataggagtacatgtacaaaactcaatgcgcaccgacttctcggagattacgcaagcacgatatacaacggaaattcatcagcccgttagttttcggggtcctgtttgtcagaaacacgcacaaaaaagacgcctatacatagaatctcttcgaggcgaggtcttttcgtcctccattgccattgaaggttctgatttctggcgttacagcgcccacctagagggagagccggcgtcccagtacgccatcttccgcctcgatgacctgctcgaaatcgaagtcgtcgtcgacgggcgccaagagctcgtccaggtccagcccctcaggccagaactcgctgtcgtcgtcgacggccgctatctcctcgccgccaatctccccggccaccgttgacgtctcgctgctgccatgctcgcggtcgccggtgccacggccggccgcctgtccaccatgctcgtggctcttgggagaggaggccgcgctgtgctcggcggccgcgccggacgacggcttgtggcgagtggtgcccgcgagcgcgttgagctgcgtgggcacggggtggcagtgctccgccatgtaggtgacgatgagcaccccgggcttcgctgggctgcgctccaccagcttccgcgccatgcaccccttcatgctgctgcacttgtagtaccccctgcggccacagatcaattcccatcgcaacagtcgcgttagttcgctgagcgtgcgggccagcagccacagggtcaactgcaagcacgcagtacggctatcgaattacagtatcttgtacgtagtactgtactgcaaaaagcttgattggtgatgtccaagtggctttggcgtctcgctcttgtggctgaattatcaaagctcctaattacactagctaggctaggacacctatgcgaagcctcaaggatggcatgcatgccatccctttcttcttgtttccttaaagaaaaggtgccttcttgtttccttaagaaaaggtggcaataattaaggtgttgggagtgattgagtcaacgttcgacgataaggccacctataccagctagctagtagcaggcagtgagtgcaacgcgtggaaagcatgttaaggcgaggtcaaaggtagttaccgcggataaggcgagcccttgatgggcttttggccatacttgcgccacgcccacgggtccgacgacgacgagccgccgtcggccgccggcatctcccgcaccaccttcttcagctggctcttcttgctgccataccacaaccagggaagaaaaaaaagaagagaaaagcaataagccatcatatcatcgcaccaccttcttcagctggttctactactaccgttctatgctgcacgggacgaccggtacggtaccttcttttaggccgcgaagtgcgcgcgccgggcttccggcctggcggcgacgccctctgctgcgtcccggacgtggacgccgccgccgccgcggggaaagagatcatcacctcgcgctcgcgcccgccggcccccgcccgcggccccggcgacggcgacggcgacggcgcggccggcagcaggaacggcctgtggtccaagtccaggtactccaggtcgtacaggagcgccgcggccttagccgcgggcggcgacgcccgtccctgtcgccggacaggcaccgtcgtcggcgtggcacgggcggcgggcgcctcgtctcgccgcggcgcgggcaccggctccggcgctgcgtctggctgatccgccctcggcgccgcggcggcgggctccgggtgcgccacgctgccgcagctcctgacgacggcctgcaggtcccagtcgttgaagtgctccgccatgagcagcggctagcatagcacgccgcgcatgaaccacgacgggcggtctctcgagcggcctttggcgaggcggagggccggccgggacgcgtgcgtgctgctcgctccttgctcctgggggggactggcgggcagggagaagggggtggggttgacttttggcagtgcgagtccagcagggccccgcatatatacgcgtatgagaacgccgagtatttggagacgcggcacggcgcgggctctactctaccggcagcgcagcgcaggcccgatctctgcgatgggatgcgatgcggtgcgaggtcaacccgctgcaaagtggtgggcacggcggcagggattgaaaaaaggagagagatcgcgcacggatttgcatcccctaggcgagggaatagctgggatgggatgctactgctgctgcagtgtcgccaagtacacttgtcaagagggagcggtgccggggccaggggcccacgtctgtcgatgtcgtcgtcgtcgtgcatagcttaggcttggctttttcgtgttgttcgctttgactctgctccaaatgtcaaaagggagaggagagagagagagatagagatgtgctggaagattcgagccctctgtcgcccgtggcataaagaagcctgcagtgcaggctgaggcgtgggaataaaccggaatttataatacggtgatgggggtgaatcgtttttttacacacttcgggacccttttttttaatttatatgtacgttatttcggtccctccctcaggcagtatcggggccgcgattgactagtaggcaggcgtcagtttattcttgttccgatctgaccctgcgcaaatgtcaaagggcaggcagagacattgttgctgcgtgggggccaggcggtcaggccaatcgacgcggcggtgagtggtaaaagcgtgaggcgcttttggacacgacaacgacgcgcgcgccagacgcgcgagagcattgttgctgtcttgctcttgccgccgtgcgcgtgccgtcgatgccggggccgggacctggagaccgcatgctttatttgtgccggccgcggcggcgacgacgacgacgacgacgaccgagatcggtatccccgcttttctcgaacggtcggtccactgcaggtgccccatgccacgacagcagcagcagcagcaggagcagcgagccacgcacgcaagtaggcacgcgagtgcggcgggtttttggataagtttggtgtgccgaatgcattagccgaggcggtgcgtgcggtccggcctgtccgcgttatatcgctccagcttgttaggtctgggcgtgctccagctccgcaggcgcgcgccactgcaacgaatcgatcgataatggatggatggttgacacgtgactgcgtttgtcgcgatcggctacctgacttcggttgaagcaaccgactgcaggtccaggtcccggtccggtccatacgcaccttttttttttcaaatggctgccctagtttgttgaattgtgtgtacactggtaggtgtcaagcttcccggccgggatttgtattctttcccccccttcttttctttttacaacgattttattcttcttccaaggacatggccaacaacgtgggggcggttttggttacggtcttcgacacagattattgcctggcttctaccattttcttaattacaaatgttttggatggaaaccagttcaaatatctgattatcagtcggtgcccatatatgctgatggagcccgttatatgaaattactatacgaacggttcaagaaaacaacgtgtctacgtccttgtctctcgcctctcagaattccaaacatcaactcaaccgcgcgcgcctgtcccggcccgccctttcaaatttaacccgaacctaggagtttctctccatgcaaacgctttgtcaccctaagggctaatttaaaaccattgtcttataatatactttgcaattgttatgataattgaccagctctaagaatactatctattgtttgcatacactactgtaaaccatgaccatgtcatgcaaactttagtttcgagtggaattttcaataaaaaaatatcatagtatttacaatactatacttttgaaaacctagttttttttaaaaaaaaatgcaactaaacacctcaagacataaaatactctgtatttctataaaccatggcattacctagaaaccataaaaatattgtacttccaaacaagtcctaaggagatgttggggactgctcacctagatagaccggtggcgattagaagttcagtggtcacctagagagccgtgggtgaatccacttgatgtgaacacgattatggttggttcaccatgctagagtgacaaagaattagtccacagagagcacctggtccttgcatggtttaatggggagccacacccttgcgtgggtggtccaatgagaactggtgaatagtgttgactctttgatacctcaggaaagcaccgtgacgtttgtaatccattatttactttgaacattttacttttgagcaattacattcaaatacttatattgctagaattgccatggtaatataagattggaacataagatgcaaaacatttgatggttacatagaaacacttcctagacataataggtgaattgggatcattgataggttttaatttatgttgcaaattttatacaaactcacttcatcatttctcttgagcatcttgatcctttcaaagacctagatatcactattagtttctcctataactttcgattctagccacgaatcagtagcggtatactatt

SEQ ID NO: 4963 - DNA, 3404 bp, Zea mays
gccggccggtcctggactgcaatctccatgcccttccttccttccttccccacacaccatctctctttcacatggaggatttctttcccttctttcttcccacaaatattcccaaagaatcttctgtgttgcttctctcctcggattcctcttcccctcctcgcctcccactccaattattcctctccttactgacttgcttcgcttctctgttatctctgtcctctcctcgtgtttgttcttcctaccagcggagcgccagctacgcgctgtgcctcgtgcctagacgaacggcataggcaccggacggtggcgtcatgtgcgtggaggagccggaggacgccgaacggtttggttttggagacccaggggtcgaggagcccgctaagtttcccttggctcagatggagagagtttgtgaaaatacaacttctgctgatttcaggcagaagttaagcaattttgtcccagtaatccgatcgggggattggtctgatattggaggtcgccaatacatggaagacacccacgtgtgcattccggaccttgctaagaactttggtttcccatcattagataatgaagttgtttcattctatggggtctttgatggtcacggtggaaaagatgctgcccatttcgtttgtgataatttaccaaggatgattgtggaagattcagatttccctcttcagcttgaaaaagttgtgagaaggtcctttatgcagattgattgccagtttgctgagacatgctctctccatagagcatcgtcctccggtacaactgcacttacagcaatggtttttggaaggtctcttctggtcgctaatgccggtgactgtagggcggttctttcccggtgtggcaccgcagtcgaaatgtccatggaccacaggccttgcagtctcagcgaaaaactgcgcgtagaatcgcttggtggctacgtggacgatggctatctgaacggtctgctaggagtcaccagagcgcttggtgactggcatctcgagggcatgaaaggagctggtgagacaggtggtcccctgagtgctgacccagagctcaagatgaccacgctgacgaaggacgacgagttcttgataattggcagcgacgggatctgggacgtcttctcgaaccagaactcggtggacttcgcccggaagcgcctccaggagcacaacgatgtgaagttgtgctgcagggaaatcgtcgaggaggcgatcaggcggggggctactgataacttgactgcagtgctggtctcgttccacctggaggccccgcctcggatcagagtggaccgtcctggtagggtggagaggagcatatctgctgaagggctcaatagcctcaggatactcctgggaaggcagtagctgcgttcttgtcgcgattttaggtgctgtgccgcattgccgagttgtaattgtatgtagtcatctcggctcctcattgtcgttagctgttacccgttgctgcgactgcgacacgtgttacgattcttgttggtgattgaaccaacaaacctgatattattcttgttggtgattgaaccaacaaacctgatactattcttgttggtgactgaaccaacagatttgagctccgtcctgtgagagattttaagcagatgaaagtatatctggcaaagaagctgtgagttcccagctcactgtgtaatgtttgccttccgttatgtaacaaaacaaaacaattcattgactgaaatgtgtcaggactgggtcaaatttcctgttctcgcacgactgttcactcgggtggtctttctcccatgatacaaaaactatgaagctggacacggttgagaacaatgtaagcaacagaatggttcggttgcggaaacaccggccgttgtcgcctgaccggtgtcgtcggtttgcaacgaggtcaaaacaatgccttttcgacatgccagtgaaacaaccgaactgacaagttcgcctgtacagctgtactttactcgaggaatgcactggggggaaaaaatatgcgcgctcgtgtacattcctctgcagacaagcgcacaagtttctaggggcagatgtatgtcacacctgagaccaggcagagtacttgccaagattataattctctttggtactttcaagcatgcattggcacctaatcaaggggggcaatggcctaaacaaggcccatattgtgggtagacacacctctgcaaaggccggcatagagaacataaactattgccacgtcttcgcattggtacttcaggcaacccctctgctgcagacatgagcacgccgatcactggatggggctgggggccagggtagtgttccagagcaaagatgtatatattcatctgagtcaaatggttcagcttcaagcagtagagaccacagctcttcagtcttctccattccaactgagcttcatcaccgaactggtccaagaccctcgcgcagagacaagatgaagaagagttcctcgccgttggtggcggtggcggtcgtcattgttctgttcctggtgatggcaagggtgcagggtattcggctggatgcagagagccatgaggcattcagcaaccagatggttcgtgtaagtaatcgtcattcgcgtgcgcattttgtactacacacagtgcattgactctttccgcagttcattaactgtagtgcgttcttgattatttcagaaacccggggagatgggagcgacgtacgctgacagtgagtcgcctggtgaaaaaatggagggaagcatctctgaagagaaagatagagctggccacggtttgccggagattcatgtggattactacggtccaaggggtcataaatctagacaccactgagcagataaaataagatcatctgttctttttccccctatcttcagatgcacccccttaaactagtgagcgcatcacttgaggctgcctactctagcagatagtaatacttaggatgtaattcatttattgtttcccctttgaagagggggaagaaacaccactgatgtactaattcttgaaggaaaaaacaatcaagaaatagcaaattgcatgattattagagagctgcagctgggtgtccaagttccaaagcaactgcggtattcaccatgtgtatctgttctttaggccaaacacttagtaagtttatttagcagtttatttacaaaagctagaaatatcccacgtctatattaggacaaaaagataaaagatagtcgtagttcactttttggtccgctttatggggctagggacggtaatggatctcgatctaaatgtttcttcacaattcgttagggctccaaaaatattttagttcagaaatgaatagaaatagagaatatatttttatagttactccaaccaccaattcctaaaacctgatccgaccctg

SEQ ID NO: 4964 - DNA, 2188 bp, Zea mays
gcacgagaccattacctagaacatcctgacgggatagagacaaccggcacccgccgatcgctcgctggtgggatgaagaaatgctccggcgtgctcttcatcctcacactcgccgtcgtgctcttcctcctctcgccgtcgccctcccccactccaccccccaacaccgcacccaatggcccgatcaccgacctcctccccaccctccccggcctttcggacctctaccctcccgctcccaactccactgcacatctctcctggggcctcctccgcccgctcctctgccgctccgacgcgctcccgggaacctctgcaggcgtcctcgaggcagccgaagcctggcggaatctcaccctggctgtcaccgccgcggcaagcgaggaggaggcgcgtctccaaggactccgctgctcatcgtccgtgggaggggatctacgcacgggacgtgccacactcccctgcgggctctcggagggcgcggcattgacggtggtcgggattctcagggagggggcggccaagttctgggtggaaatgctgggtgcgaacggtgaggttgtgctgcacgtcaatgtgagcctgggagccgcgggggtgttggtggagcagaattcctggacgccagaggaggggtggggggagtgggagcggtgcccgcctgttggtgatgtgagcagcagcaatagcagcttgcagctaagtccagtggacggccttgttcattgcaatgagaaagtgggtgcaaggatcgtccaggagagtaataatactgtggtaaatattactgggaaccaacctgaagattggcagagtcaaacaggacatggtcagttaagtggacgtttctcaattgttgaaggagagccttttacagtaacactgtgggctggtgtagaggggttccatatgacagtaaatgggcggcatgagacatcatttgcctatagagagaggtcagagccatggttggtagcagaagtcatgttttctggtgatttggagctcttgtcattcttggctaatgagttaccagtatcagaagatatagacatggaaaatgttgcagttttgaaggccccacctctgccaaagaagcaaacttttctgctggttggtgttttctctactggaaacaacttcaagcggcggatggctttgaggcgaacatggatgcaatatgaggctgttcgctcaggcgatgtagtagtccgttttttcactggtcttcacaagaatgagcaagtcaatatggagttatggagagaggctcaattatatggtgatatccaattgatgcccttcgttgactactatactttgatcactttgaagaccatatcaatttgcattttcggaacaaaaattgttcctgcaaagtacatcatgaaaacggatgacgatgcttttgttaggatcgatgaagtgatctcgagcctaaagaagagcaattccaatggccttctttatggtctcatttctttccaatcttccccccacagagacaagggtagcaaatggttcatcagtcggaaggaatggcccttcgacatgtacccgccatgggctcatggccctggatacgtaatctcacgtgacatcgctaagtttgtagtccaaggccaccaggaactgactcttcagcttttcaaacttgaagacgtggcaatgggtatttggatccaacagtacaagaacagtgggcagcaagtaaacattgtgactgatgaccggttctacaatgaaggatgcgaagctgactacgtccttgcccactaccagaccccgaggcttatgatgtgtctgtgggagaagctgaagacggaatatcatgctatatgctgtgaatagcatccgaattgcaagtaggaggcgatagaggaatggatagatagaggaatggataggttagccttggttttgaagaagacatttgctccgattttgacgctgtgtggaaaattgttgggactatgcgcaaaaagcctgtaacattgggttctcacttctgtgctgtggcctgtgggttcatgttctttgtttttgggtagaaaatgttaatccgtgcaacttgatggatgttgtaaaaagagtgttgtaggacatttgagagagtttatctggcacaacctctcaagttattggatccatatacacctgcactcgtcctataaaaaaaaaaaaaaaa

SEQ ID NO: 4965 - DNA, 1914 bp, Zea mays
gcggccaccggcttattcaagagcaccaaaaggggtttcggcatggatggatagcacacagcgagcgagcgagagcggtgagcccggccaccagcgccggaggccgtcgtcgtcttactagccgacgctcgacttgggcatgaattgctagccgcgcgggtgagagattgctaggtagccagctaggtacggtgtggggagttgaatcggaggtctgccgctcgaggcggcggcggcagaaggccggtaggatgaagaagctccactggctggtgcggttcctgttcgggccggtgccggtctacttctcggcgctggccatcctcatcgtgctcaccaacgcgcagtacttcgggctggtgggcgtcggcgtggcgccgcgcaccgcgaagctggcctcctcggcgcccgtggtcagcgtcatgaagtactgcgacatcttccgcggcgagtgggtgccggacgcggaggcgccctactacaaccacaagacgtgccacatgatccaggagcaccagaactgcctcaagtacggccgccccgacctgggcttcctcaagtggcggtggcggccctccggatgcgagctgccgcgcttcgacccgctgcagttcctgcagttcgcccgcgggaagtcgctggccttcgtcggggactcgctggcgcggaaccacatgcagtcgctgctctgcctcctgtcccaggtggcgtatcccaaggacctgtcggcgaacccgtcggaccagaacaaggtgtaccactaccgggcgtacaacttcaccatcagcatgttctggtcgccgttcctggtgcgcgcccgggagcccgaccacgacggccccgcgcacacgggccactggagcctctacctggacgagcccgacgacaagtgggtgtcccagatgccccgcttcgactacgtgctggtgtcggcggccaactggttctcccgcccctccctcttctacgagcggcggcgcctcgtcgggtgcagcttctgcagccgccagtacggcgtgcccgacctgacgctctactactcgcagcgccgcgcgtggcgcgtggcgctgcgcgccatcaacgacctggagcgcctgcgagggcgcgtcatcgtgcgcatgctctccccgatgtcgcacttcgagaacgggacctgggaccacggcggcgactgcaggcgcacgcagccgctgcgggcgaaccagaccgccatggagggccgcgacctgcacttctacaccgcgcagatggaggagttccgcgccgcggagaaggccgccgccgagaaggggcggcgcctgatgctcatggacgccacggcggcgatgctcatgcggcccgacggccaccccagccgctacgggcactggcccaacgagaaggtgcagctctacaacgactgcatccactggtgcctcccgggacccatcgacatctggaacgacatgctcttccagatgctcctcgcctagcagcaagcagcaaagattaaaaaaaaaactcagcaattcggtcgccggtaaccgtgcacagattggccttcttttttttgccttgtttcgtttttttaaaaaaagaagaaaatggtgcaattttgacaagcaaggattcgaaattcgccggtaaccccccgagatcatccgttccctcctctgcttgttctgtggtgtcgaaattgctccctgtctgtcggtcggcgccgtggaaaggggcaaagcaaacaaccaaaaagggccgctcgcagtcgcagcggtggcgcctttgattctgttgtagagtagtatatggctggcgcatgcaagctgtcgaaaaaaaaaggtcacggccgtcctctgatcttcgaaccgaattgaaatgaaagttcactcccgcgccgcgcgtatcgtggccccctcactgccatcgttggctgca

SEQ ID NO: 4966 - DNA, 3611 bp, Zea mays
tcaaccctatcccaagtgttgccccgatgactggtgggacagctaagaagaagtcaactgttgggcctatcgtcggtggagtgatcggaggtttggtggttcttgcacttgggtattgctgcttctttgtgatctgcaagcggaagaggagtgctgggaaggatgcaggcatgagtgatggacattctggttggctgcccctgtctctttatggcaattcacacacttccagttcggccaagtcacacactactggtagctatgcttcatctttgccatccaacctgtgccgccatttctcttttgctgagatcaaggctgcaacaaacaactttgatgagtccctcatcctcggtgtgggtggatttggcaaagtttaccgtggtgaggttgatgggggaacgactaaggtggctatcaagcgtggcaatcccttgtctgagcagggtgtgcatgagttccagactgagattgaaatgctgtccaagctccgccaccgtcatttggtgtcactgattgggtactgcgaggagaagaatgaaatgatcctggtctatgattacatggctcatggtactctccgcgagcacctgtacaagacccagaagccacctcttacctggaggcagcgtttggatatctgcattggtgcagctcgtgggcttcactaccttcacactggtgcaaagcacaccatcatccaccgggatgtgaagacaacaaacatccttctggatgagaaatgggttgccaaggtttcagattttggtctgtccaagactggcccatctatggaccatactcatgtgagcacagttgtcaaaggcagtttcggataccttgatcctgaatactttcgcaggcagcagctcacagagaagtctgatgtatactcttttggtgttgtgctgtttgaggtcctctgtgcacggcctgccttgaaccctactcttccaaaagaggaagttagcttggcggagtgggcgttgcactgccagaagaagggcgttcttgatcagattgttgacccctacctgaagggaaagatagctccacaatgcttcaagaagtttgctgagacagccgagaagtgtgtttctgatcagagtattgaccgcccttcgatgggcgatgtgctctggaacttggagtttgcccttcagatgcaggagagcgcggaagagagcggaagcctcggttgtgggatgtcggacgagggcactccccttgtgatggtcgggaagaaggatccaaatgacccgtcgatcgaatcgagcaccaccaccacaaccaccacttctttgagcatgggcgatcagagcgtcgcgagtatggactcggatgggctgacgcctagcgccgtcttctcacagatcatgaaccccaaggggcggtgaggtaaagctggtcccattcgttaccttgcattcattcagcatgtttttttcacgagttcgtgctgttacggttctctcgaattaagaaccagacgtccgagaattgtttcatactagatattctgccttgccctatacttcttccccagtattgcaacgactgtacatctgttggcttgtattgtaccgctgctattgacccaactagtattttactttatgagaaagtgatgtgcacgaactattgttatgagtggtcgtgtgacgtgctgttaggaaggagtctcgactctgaattcgacatgcacacttgataatcagttttcaatctgaatgggttgcgagagctgatagatcgttgtcagaactgagattgtgtcggtctttgccctccagatgaattccaactgtcaaacaatttttatagaccgtttctgacgactaatcgagctggcagctgagatattcttcctttagacaaagtgattcttagaaagctgtggacatttcacatcggattgtaggcggttcacgttaaggtgttatggacactaatatactactacctccatcctttttatttgtataaaaatgaactgcaaaacgtcaaataaaaaaatggagggagtagttttgtgtgtgtgtgtgtagtgggtgttcattggttgtgtgatggtgactaacaaaatatggcgggttatgcttcatatacctcttgtttcgtgctgtatttgggaaagatcatgtaaccaatgctgatgacgcactggatcgtgcccttttagttccactgtcttggcactcactggcagttggcacttctctttcgcaagctcggtccttggacccatctgagctgggaggttgttgagacggttgtttcggtgcagtcgagaaacgctgccgaggtgacgggagagaccccacagtttcggtctcgggcccggaacagaggcgacgaacagttttggtttcagaaccatatggctgtttctctagatagctcgatatgattgcgttgttgattcccgtgttcgcgtccgctcatgtatcagtcatgtgcccaatgatcgtgctctactcccatctctactcccatctgtgagctgtttcttcttccgccttctggccgcacccaagcggtacggcctggctatttcaaattccagcaagaagctccgccagctcccattatccttccgataagactgcgtcggcatcctgatatccagcttggaatcatgagtaataacaaacgacgtgtgtcagtgttactctgcaatctgcatcagttatgcgcctaacgttgtgatgagcaagtcgtcggactattcgctttagattagccgactactgcagctctaatatatagaaacaaaaaaaattataaaaacagtaaaaataggtacaaattaaagtcaagcgattaggccgcatctttaaaaaggaaaaaaaagattggtgatgatgaagtatgtccaaagattcggtgttaaataataataccggagcctgatcgacacgctccagtaacttatcttctggcccgacatcgtctacgccgtccagcagttgtgtttgtatatgcacaccccgcgagagcccatcttaccgtccaagtggattctacgctgcctccgtagctccctcgactatagcctccttattcgatcatccccgacggactgctatatgtttcttcaactccatattttttttttaaaaaaaaagcaggtgtccgcgaacttaaaatgaatggtaggttagaatttgtattagatagttgttactgcccttgttctttgtggagaatcaacaagaatggcttaccatttttaatatattttttctaagcttgctaaaaaagttcttttttatttgtgtgtgtgtgtaatttcacttgttagatgaatatgtcatatgcaatggctgcaagagtccggataccattctttctaaagagaacagactgttcttcctccgatgcgagcaggtaaattgtttcataatgttagcattcccaattctctctggtttcgtcatgtgattatttgtcgcgtaatatcattgtcctattatctgaagtgcttctagattaaacactgcctatgtgcgttcttgcctgatcggcatggcttagtgtccttggcaaaagcttgcttcaatgagaagttgaaaactggaacagtactgaacagtactctggaatggata

SEQ ID NO: 4967 - DNA, 5788 bp, Zea mays
  misc_feature (747)..(747): n is a, c, g, or t
  misc_feature (2785)..(2785): n is a, c, g, or t
tgcccgtctgtagtactttctttatttctcctacttaatttccatttatctaactttaatccctgcatattcatacttagcaatcatgttagtccacattattgtgttggtcattaataactaaaatatttatagaaatggtcctaagcacatttccctttcagcaggtacaatcttgaccatctggatcaggttttcaattacataatacaaataagagaccattacaaagatattttaaaatctagtcacatcataatatagctaagaaccaatatttttagagagtcctctaagacatactctttataaagagactgagtcttttatttttcatctaacatcttacaacatgcacaatctttagggtttttgaagtatatgagatgactaagggactttatttcacaagactaagatcctagatcataaatgtactttagagacaatatgtatacaaaaccgtctagagacatctaaagaggctatatattaaatgggattgtacatgtttgtcggatactcaggaacgaggtacccaaggcaaggcccataattctctctttggcccatttactgaccaattcctcaccgagtaagtctgcatggtgggacgaacgaccaagtcctcgccaagcaagtctgcgagacggggcgaacgaccatgtccccgtcgagcaagtctgtgaggcaaggtgaacgaccaagtacccgccaagctgatccatatgaagaaaacacaggccnaagctggcaagccacgtccgaaccgtacatacaatatcaaaagggctctggctgacgcgatagaacacccccgcatgtgcccacagatatacccctcactgactcatgggccagtcaacccagtcatgagggcctcaacactggagtctctattgtgacccgcatacccgaaagaacgtaacaagtatgcatatcgggggttatgtccacacacgccaggggtgacataggcccatgacgataggtggaaccgcgccacgcacaaccgctccatgtgactcgccctagggacctcgcgcactactatggaggtgttaggaatggactagctataggaggtcgtgtgacaaacgagcaagacgatacaccataccaagagtacgactatgcatgaccctacggaggacccaccacgacaaacctgggggtccaacctctctctctagtagaaaacaaatctcctctgtaaggtcctacctctgagatataaaagggcagaccccctcctccttcacacacaagcacaactactataacgcgcctcgaagcaatactacgatcaacactacactggactagtatgagagcctgaataagtataactccagtatctcagctccttgctcgtatccccgtgatccaccattaagagtgagtccgcactagtatccccaaccgaacacaaatttattgtcttccggttttcaaaaccacgacaatgtccttagaggcctcttaaggacatttttattaagcattttatgagttttgttcttattaaatgatatgtcatataaggaagcatgatgtcatgatatgcaatataataaagagagagtttatgggagataagattgttttatcaagatgaaattttagagatgttaattttttgacaaatgttgacatgaaagtctagagacctctaatgcagtgggttaaatagatccttcatgaaaagatcatctttatactttttactagttagttgcccgtgctttgctacgttttttatatatcgtacaaataagtactgagatatttattcaaatataatcattgtttatttctaaacattaatatacacgtgtcttggtggttagcccaaatttatagaggaggaggacgtgatttcgagtgcttgctctgcactatttttaatatatttattgtttaattctaaatgataaggcgcgtgggcgcggatctagagtatgagcgtggagaatgaagctgtgctaggatgtccaccttgcattccctcatgcagttgaaacgggcaaccaataaaacaaattatgtttttaataaattagtatagatatagatttaaaccttttaaaatgagatattaaatggactctacgtgctcaaccgttcagtttcgatcgtcgccgcgcaccgtttccatacttccgtttccaccagctcatcacgagcaggcgggtccaacctcgcagtcgcagccccgagatttgactgctgtccttggctccgctgcgggcccactatcaccattgccccgctcctggagctcaccaaccccgcatccaatccacctctgcggcccactcgagcccgacgcgtccgctccctcccctagaccgcgctcaccgtactccggtccacggccacgtttgtcacattcgtgcgcatctgagagcggttcacagacccaagtccatactacgccaccgacgacctctccgcgcgccgacctctcggtaccgaggctttcggcgccgaatctcccgtcccccacctgcccgaacggtccctagccgtccgtatggccaggcgacggccggatgggcctccagcggggcacgtggcgggcgagcaggggcagccacccccggaccccactgcgacgcgagcggcctgcaccgcgcaccggcacggcacccggctgtttgaatcccgtgggccccactcgcagtaaattcacctgcataaatccttcagcagtccggccccatacgcttcttaacccatttgcatgacaagcggccctacggaactccatgacccacatgtnggtgggtgtttcaagacagcggaaccgacgaagcagaacgtggtgcccaaggaataagacagttaactccacgtctccacctcaccactgccagtaaacagcgagtcctcccttgctccgtcctcctcgtccctgccgttccccaaacccaaagcagagcagcctcggcttctcttatccggagaggagggcggccgccggcgtcgaccttcgcgaggaaggagaggaggccgttggatctcgctggattcgattgggctaggacgggatctccgcgggcaggtaaatactgctcattaattgatttccttactcgcgtcgatccggcctttgaatcgagagattgctcccggttctggctggattgaataaccgatttcatttcaaggaaaggtacttcgattcttggagctatttttcgctctcctttccattttcaccatttccttgtttgatgatttcttgatctcgttttggatttatcatgtatctccgcccgcctcttgctgaattgagtcctcgccgccgttgcagatgcgctgagctcttggcgtgtgcagtgcacgatggtcgatcttgctgatctcgagggtgcgggcgaggcggcgcgctcgcatcccgccgcttccggccagcgggacaggctggcggcgctgctggagctcgctgcggcggacgacgccgcggggttccgcgaggcgctcgcgggaggaggcggccagggcgacgcagcggagctggcggacggggtcgggctgtggtacggccgaagcaaggcgtacgagccgcgcacgccgctgatggttgcggcgacgtacggcagcgtcgaagtggtgtcgttgctgctcggcctcggatgcgtcgacgtcaaccggcgccccggcgtcgacggcgccaccccgctgcactgcgccgcttccggcggctcgcgaaacgccgtggccgtggtcaagctgctcctgggtgccggcgccgacccggtaactcccgactccgccggtcgcttgcctgccgacgtcatcttgtctccacctgcttcgcccgacgccttgggcgatctggagatgctccttggccgccgccgagggctcgctgtcgcgacctcggtgccatcgctctcgtcgtccccgccgctctcgtcctcgccggatgagagcaacaggtcgccgtcctcgcggtcgtcttcgttgtctccgattaccgtcgaccgtgccaagaaggagtacccggtggatccgacgctgcccgacatcaagagccgcgtgtatgcctccgacgagttccgcatgttcgcgttcaaggtgcggccatgctccagagcctactcgcatgactggacagagtgtccgttcgtgcaccctggcgagaacgcccgccgccgggatcctcgcaagcacccatacacggcggtgccctgccccaacttccgccgccctggtggctgccccagcggtgatagctgcgagttctcccatggtgttttcgagagctggctccacccgtcgcagtaccgcacaaggctctgcaaggagggcgcagcttgtgcccgccgcatctgcttcttcgcccacgatgaagatgagctccgccatgtgcctcacaatagtggtgcaggtctgctgtctccccgtgcctcttcatccattgacatgaccgctgctgctgctgctctagggcttctacctggatctcctaccaggcactttgtgccaccacctctgtcaccatctgctgccaacaatggtggaggtgctgctgctcattggctccaaggtagcaggctgcgctcttctttcaatgcaagagatgcacaggctgatgaccttggctcgctcctggaatgggaatctcaataccttggagcgctcagcctcccacaaagcagccgatcccagccccgtctttctactggtctgactattcgtccaacagcagttgctccatcctacctcgaagagatgtatgcttcagacatggctatgtcgccaaggttcaccaatgaccaaggtcactcagtcttctcaccagcacacaaatcagctcttctaaacaagtttcatcatcaacagaagggccttttgtcgcctgtcaataccaacaggatgtactcaccaaggggccttgatccatcaattatccattctccatttggtggcatgtctcctcggtcccctcggactatggagctaacatctcccctaagtgtccgtgttggtgttggagctgctgttactccgcgtgatatgttggatcagttttcttccctgaacaagcaccaggtgccatctgtgggatcgccacggaatcttaatgcctcatggggcaacattggtaccccaaagagtaaggtcgactggggtgtggacgacgacgaactagtgcgcttgaggcaccctgtgcaacatggaaatacagaagaggaaccagatgtgtcttgggtgcagtcactggtaaaccatgctgagctgaatggcaagaggggtgaaatggcaagcatggcttctccatcgattaacaagcctgacctgagcttttagggtgactcgctagatcagtgttattgcttcttggcttgagcagcaagatgcgcttggagccgaagtaactgtcaaagaggccttttgctctcaaggtggatgaaaccatatttttgccgcgttagtttccgagaagaatagttatttgtcctagtaaataataatattctttttttatttcttgaaattttttgttcgcaaagtcggagatggtgtggtcttcaggaaagcatttgctcacaaattggtagctgaaagaagctgtcgagtattggtaaacagcctcgttaccttggaggtcctaactagtattcttttgattagttcagatgaggtgaaaattcatatggtcgaccgtgagagtcgatagtaattgtgttgatctctgtaacaagagaggttatagatttttttacccccatttgtcaatgaacaatttcataaatacattgatatttccagttta

SEQ ID NO: 4968 - DNA, 2275 bp, Zea mays
acccccgaggctcgccgggcctcgtttaggcattcccctcccctcccctccccacctccccgtcgtcgtagtcccctgttcatccatcgcaagaactcctgggatcgcgctgggttcgccgcttgcatgcatgcacgcacaagcccgcgagcccggccggggtgccagcatattcgttcgctagctcgtgggctcttctccgtctccgatcccttccgtccgcgctgaagaacatgcgcgcgcgccgggctgtttagatccgatccgatccaggccttcttccgttgcaacctgtgccttgaggcctcctggtgatcgatcttctgcattaattgctggctcaatggtcgccacagccacaggcgtagagtgctgcaagatctttggttttgttgctctataaacactgcatgtgttcagtattgtgaggccattttaaggaatgcagaaagatgtgtttgagtgaaaaagatttctgctctgaagaggagcacatttctccaataaatttcgaatcgctaataattcttgatgagcgaggatttcaagcacacattagacgcatagtagaaaatagctgtgatgcaactgatgtcagaagaaatatcgcaatgctatgtcatataatttctgaagacggctgaagttctctctttaccaagttcctacaatcagttggtagcaggtgtctatatatatatgatggaagcagagaagaatggaaacattcttatgcaaaagtatgaggttggaaaattattggggcaaggaacatttgccaaggtataccatgctaggaacatagagacctctcaaagtgttgctatcaaggttattgacaaggacaaaatttttaaggttgggctaatggagcagatcaaacgagagatatcggtgatgaaactggtgaggcacccaaacatcgtgcaactttatgaggtcatggctactaaatcaaagatatactttgtgcttgaatatgtcaagggtggtgaattgtttaacaaaattgctaaaggaaagttaagagaagatgcttccaggaaatacttccagcaattggttagtgcggttgatttttgtcatagtaggggtgtgtatcatcgtgatttgaagccagaaaacctactcgttgatgagaatgggaatctaaaaatttcagattttggattgagtgctcttgctgaatcaagacgccaagatggtcttctacacacaacttgtggtactccagcatatgtggcgccagaggttattagccgaaaaggatatgatggcgcaaaggttgacacatggtcctgtggtgtgatcctatttgttcttatggctggatatcttcctttccaagattcaaatttgatggagatgtacagaaagattggaaaagcagatttcaaatgcccaccatggtttccatctgatgtacgcaagttagtgtcaagaattcttgatccaaatccaaggactagaatgccaattacaaaaatagtggaatgcttttggttcaaaaagggcattgacaacaagctaatccgaaagaatatcgagatgaaagggaaagtttcagctctcactgatgttaatgtagttttctcatccacgggtattggtagcaacaataacaaattggttgatgtggaacaagatgtagcaaagattaccaacctgaatgcttttgacattatttccctttcagaaggctttaatctttcaggcttatttgaagagtccgagaaaagaaaagaggcacgcttcacatctagtcaatcagcttcaactattatctcaaaactagaagatgctgccacctgttcaaagatgacaataaagaaaaaagaaggtggtgtgctaaaaatggaaggtgcaaatgaaggaaggaaaggtgtactatctattgatgctgagatctttgaagttactcctgctttccatcttgtagagattaagaaaaataatggggatacactagaatatgaaaatttgtttaagcaggacatgaaaccagcgcttaaagacattgtttgggcatggcaaggtgagagtaaggaccaacaggccaaggatcacaatcaatcataaattactcaaccagtttgtttccataataagaaataatgtttgttagtgttcaaaagttgtatctacttcaaactttctcgcatttgacataaacatgtgatttgattcagagtttgttaagaaccatagtattgttatgttacatctatcattaattgtttttctatattgataaaaaaaaaaaaaaaaaaaaaaa

SEQ ID NO: 4969 - DNA, 3886 bp, Zea mays
  misc_feature (465)..(465): n is a, c, g, or t
gtatggcaggggcctgccatcagagtacctggcttgcgaagtggccgtgaggagcagctcatcccacttggaagcctcgtgctcgagccactcggcgcgggcacacagcgcggcgacgtcggcctcgacatcgaagaggtgcgtgtggaggacgttggcctcatttgcggcagtgcccgcgcttcgtcctagcgtgacgtgattgatggtcgcgatgtcggtctcagcagcgtgtggaggaaaaagcgtagggaggcatcgaagaggtgcaatgtgatcggtggtcgcgatgttattggtgcgagcccacgtcgtcgccgtcttggtcggtgccgaggaagcgatggttgaatacgagggagggggtcgctgagataacgatgctcgtgggcgtgcaggaggagcgccattggtttctgtgtgccggttgcgatggtgatcaacagttggagatgatggggcaantctagttgaggtgagggagcgagatcctcggcccagttgcggcgtcagctctctgatggagtgcgggccagcacagatggagcgcatgccgagtacgtgggcggcccggcgagcgcaatgaagcatgtgcgaggatgaaagggagcagggaggaggttggaaggggcgggcgaggccaggaaagacagaggcgggacatgctgtaggggtggacgtccacatacgctcttatagtgtagtagagattgatggctatgactcctaaaaggcattgagtcgagcatcgtatataaagaagtaacaaaaaatgatatattctataaataagatagctataatattgacactttcataggtctatagaataataaccgaggttaccctttttagaaggactaataaatctataacttgtcatcgcttcctatatatattataaaaattactctatttaaattcccaggccgccgggggttttctccttctctccttggttgcggccggcccctagtggttagtgggagtgacgtccgaatcaactgtcaccgtgtggcccccgcgtgcgtgcttgcctccaccaccagcgcgacaggcgccaagcatccatgcttgtcctgtctatttctaccgtctcacctctcgtcccgtcttctccacgatgggccacgccacaccactgagcacccttcctccctgttcttgcctctgtcctatactactactactacccttctttagccgccgcgtgcatgctagaagagatatagccgccgatcgatcagcgctcgaccgacccgtcttccttgacgaacgaccagctaggaaacaggaggccccttctttgcacgtgtcagtgccagccagacgcacccaaggtgaggcctcgctgttcaggaccctttaatgcccccctcctttgtttggcgtgcctctgcttcgtcttcgtggtatataaatgctttcccctcttctgtgatcgcctttgtgcctgcgccattggggcctgtttggagaggggggttgccgtccaaatcgaaccaggctctgaacatccgtaaagcaacccccctctccattccaaacaggccctcctgcctccgttcctgggctagctgtcaggacggctcagctccagctttgcggccctccagctctccccagttcaagttcaatattggcgagcatgcgagtttgccctcttccgtcgtcgtcatcatcatcgtcctcgcgatcccggcgtccctgtttcggcctacgcctcccgtagacaacagttgcgccctgctctccggcaagctatggccaagctgagctgcttccccgctctgctccccggcaagaggaagaagaagacacgcaagatcaccgatgctatcaaggccagcggcaacgagtgccccaaggtgaagccggtcgaagtcgaactcatcgacccgacgcttggtgcaggcgtcgtccaggacgtcgtccccgccgagctctcggtccccgtggaggaccgcaacaataaggaagcggctgatcaactggtgttggtgaaggagagcgatctgtcagatttcgacttcagcttccacgcggccatgaagcccgtccggtccgacagtgacgtggcactggacacctcggccgacgctgcggtggcggacacatcgccgaagctgaagcggtcttgctccaacatcgagactaagcgaccaggctcgcgttccgcgcccgagatgccggcccggtcgcgctcctacggcgatctgggcaacctggtcgccggcctcgccctggacgcgacggcgaccccgcacggcgcgccggaggccagtccggcgtccgtgaagacgtcgcgcaccgccgaccgcgtgatgctgaagaagcggtcgtccagccaggtgctgccctcgcgcagccggaagctctggtggcggctcttcctctggagccaccgcaacctgcacatgccgcggtcggcgcgcacggcccaccgatcgttctcgcctggccgccacgacgggtacacctcggacacgttcgaggagggcccggccgccgaccgcaagaacaagacggtcatggtcgacgagtcgccgccagcagcgtctgtgcccaaccagtgggtcgccttctgcgccgagagctccatccacgaccgcgtcagcgcgtgggtcagcagcatcgaaagcgagcctccgttcgatatcgccgaggaggatgacgacaactacgacggagaggacgatgaggagaatggcgagtgtgcggcgtcgcagccgcgccatctcgagctcggggagccatcgtccgggaagggcggaaacagcaaatccaagcgctgcgcaacgacggccgacgaggtcgtccaggccaacaccgtggtgcagtccctgaacgccttctcgtcggtggcgcacatctcagggatgggcctcaaggtggtgccgatgatcgcgcccttctcaaccctccgggccgtcaacctctccagcaacctcatcgttcatatctcccctggatcgctgcccaagggcctccactctcttgatctgtccaggaacaagattgccagcgtcgagggcctccgggagctcacaaagctacgcgtgctcaacctcagctacaacaggatttcgcggattgggcatggtctgtcgaactgcacggccatccgggagctgtacctggcgggcaacaagatcagcgacgtggagggtctgcaccggctgctgaagctggcggtgctggacctgagcttcaacaagattacgacggccaaggcgctggggcagctggtggccaactaccactccctcctggcgctcaacctcgtaggcaacccggtgcaggccaacatcggcgacgacgccctgcgccgggcggtcacgggcctcctcccgagccttgcctacctcaacaagcagcccgtgaagccgcagcgcatcgcgcgggaggtggccacggacagcatcgcgcgcgccgcgctcagcggctcggacagccggagcatccggaagaggacgtcgcggcggctcacgcagagcccccgctcgtcgtcgttgaccagggcccgtggcggcggcggcggcggttcacccacaccaagaaacacctctcgtcgtcgttgaccagaagaaccaactgcgtgattcgcgttgctctttggagacgggagacggcggcgtgactgcgtgcaggcagactcagacgacaccatgattcggcacggcgccagcatgatatgagacaaaccaagtatataaagcaagtatgatgtgagagaattgcgatgcaacacataatgtacatacttgttagggagatattgcttagattaatactacgaccgatgcatctttgtacctgaaaatatcaatttgagcctggttgaagatgaacatccatccaacatcgcagtactgccgcttcatgg

SEQ ID NO: 4970 - DNA, 1446 bp, Zea mays
cctgtgtggacccccccggcccggaaaacacccacttcacctccgaccacttcacctccgatcccgccaccactacccaccctttcctttgacgtcccgatggcacctgtagatctaacccccaagcagcccaggaaggcctacggcggcgacggcggcgcctactacgagtggagccccgccgacctgcccatgctcggcgtcgcctccatcggcgcagccaagctctcgctcgccgccggcgggctcgcgctccccagctactccgactcagccaaggtcgcctacgtcctccaaggcacgggcacctgcggcatcgtcctcccagaggcgacgaaggagaaggtggtggccgtgaaggagggcgacgcgctggcgctgcccttcggcgtggtgacgtggtggcacaacggccccgccgcgccgaccccgctcacggtgctcttcctcggcgacacctccaagggccacaggccggggcagttcaccaacttccagctgacgggcgcgaccggcatcttcacgggcttctccaccgagttcgtgtcgcgcgcgtgggacctgccggaggcggacgcggcggcgctggtgtcgagccagccggccgtcgggcatcgtccgggcgtcctcgtccccgctgccggcgccgtcaccgcgggaccgcgagggggtggcgctcaactgcctggaggcgccgctggacgtggacatcccgggcgggggccgcgtcgtggtgctcaacacggccaacctgccgctggtcaaggaggtcgggctgggcgccgacctggtccgcatcgacgcccactccatgtgctccccgggcttctcgtgcgactcggcgtaccaggtcacctacatcgtccgcggcagcggccgcgtccaggtggtcgggcccgacggggtgcgcgtcctggagacgcgcgtcgagggcggcttcctcttcatcgtgccccgcttccacgtcgtctccaagatcgccgacgcgtccggcatggagtggttctccatcatcaccacccccaacccgatcttcagccacctggccgggaagacgtcggtgtggaaggccatctcggcggaggtgctgcaggcgtcgttcaacaccacgccggagatggagaagctgttccggtccaagaggctcgactcggagatcttcttcgctcccccatccaactgagaaaataggccggaagccccacggtggagtcctctcgttaggtcgtcgtgcttagattaggttagctagcttgcctttaataaaaagagagtggtggtcgtcggcgtcggcttcggcggtctgcttcttcttcattcagtgcgtcggtcggtttagagtctgtcacgtgtcccgtcattgaactgcagtttttgttaataaagtattgttattattaggtattaaaaaaaaaaaaaaagggcggcccgctcgcgatctagaac

SEQ ID NO: 4971 - DNA, 2483 bp, Zea mays
ttgacaagaatgtgagtgcttcttgcttatgtgtggccatatattatcagaaatgtgttaaaaggattgaggacgatgagactgggcacaagcactgtaccggtcagtactttgattactggaaatgtgttgacaagaatgttgcagagaaactctttgagatgttaaaatgacaaattttccctccatttatccacctaaagttggtaataattgtatcacttgtgaggcctatagactattaaggcacttaatatttgtcagagaacttttgcctcttgggtaacacaaattttccactgccagtttgcatttcatttctgctactagtattgaaccagcaaggtttcctccattgctggataaaaatcaatggaatattcccaagattgtggctgagcattaaatgctataatgtaccttaattgcttttatggtgtattttgacgaggacatagctaatcattcaggtccataacttggatgagatggaataacatgtgtacattacttctagctggtggtaatgatttgtcatgagaagtttgtagtatcatcggaatgaaacattggcacaatatagttttttttccagatgtagtgagttgacacatggatgctgttatgaggagagcttgtggttatatattccagcatctcttgcattcgagcggcctgtgtggttccccggccttgtatgtttactgttcattgcatatggggctatctggtgcattatggcggggtaaaatctgatggaacatttttatctttgccatccagtggtttggttatgttcactgtcgctttgtgtttgtctcatgttctgtttgccatgcttggtgttgtgctatggcgacaactgacaagagctcacttcttgctatgttgtatcatcagacgtggaatgctcaaccagttatctgctgtgcgtgccacgaatttgttgcatcggtgcattctgactggattaaatagactggatgttctcctttgctttggatgatggtgatcaatgtgtcctgacctggcctagcgaaaatctacctgaaaggtttttcagattcgtgcagtgcttgcaccgtaacaatgccatcatgtagtcgatacatgtgtactagaatattcccaaaggtgtttctaagtttggtctaaggtctatttgagatttttgtgtcaaggctatgattatcaggactcgtcacgactcatgactcccacccacctctcacccagtcgcacttgtcattgtcaggactcccacccagccatccctggcctgctctcctaccgtacctctcgcgtggcatgcggtgtgactcccggcggcctgtgactctcggcctccggcgaaccttcggttcctgatggctggctcaaggtgagctcctgggttccagatccagacaccgacgtgacccggttaaaatcatgtttgaagattcatgttacttgcatgatacactaaacaagagtctagatgcttacatgatacactacctggactcagttcgttactaatgtttgcctatgggacatttcgcccttagccattgccttgtgcccacaccacaacagatacaacaccacttgacatcgatcaacaaggttcttgggaccaggcatagctcttcaacaactccacataaatgtcattgacaccacctctgtcctcgaccaagtggtatgttgactctagtgtcggctcccacatgaccaacattgtcgatatcgtttcttcctcacgccctcctccgtctagtccttcatctgccattgtcaataatagggtcttgtaacgtgtcacctctattgggtaatattccttgttcatgccacaatgatctcttttttctttctaatgtattaatttcacccagcattattaagaacttgatttatgttcattgctttacaactaataacaattgttccattgagtctgatccctttggtctttctatgaaggacttacaaacttggagcatgattgccaggcgcaatagcacatgtggtctctacccattcttcccaccggttagcatcactgcactttccaccatcgtgtcctcctcctccctctagcatcgttgccttggtacatcttggtcatgatgccctatgcaagctcattaggtccaatgctattttttttgtaataagcgcacagatgatcttatatgtcatgcttgtcaattaggtcatcacacatgtattccttttagcatgtaaaattctcgtgtgctacaccattttgatttaatatattgtgatctttgaacatttccgattgttagtgtatcatgttacaaatgttacctcgtcattcttgatgattgcactcactacacttggatttttttctcttcacctcaaacctgacatttttggtattctctccaatttttctcctatgtgcataccaagttcatctcacccttcaaggtggtccagtgcgacaatgtgcacacctaggttatctc

SEQ ID NO: 4972 - DNA, 1579 bp, Zea mays
ggaatgatgctattgtttctagagacgctgtgatatctggaccaaatttcttgggaaggtcaagtggatcttcaaggaggcctgttatctcgagtagccgcgatgcggtggtcaccgatagttccgagccttcacgagcgcgcacaactgatgcaagccctggggtgttccgcagagcctcaggtcctcagagaagctcacctgtccactctgcagaacagaagcgctcatcctcaggccgtcatccatctaatgcgaagaactacgattccgctctcaaaggcattgaaggccttactttagatggcgacgagagggttcagtactagagcggcaagaagaaattctacatcccctgtaaaaaagcataaccaggtggtaagcattgtgtttcctgttgagttttggatcaacaggaaacagaatgatggaaggaggatctggtcacgtgttgtgcggtttcgggtggccttctgagcaaggtaaataaacggtcctgtccgaggcgcttcaaacctagctctcgtaatgttatcgtcatgtatgtaaatgtgtcttatagtgagcctattttgttgttccaatccttacggtgttccattctgaggtgctgaacctcggggcaacaagaccgaagctggtagggacttcaattggagaactggggttcaagcatgtagaattttaaaatcggttcatttgtctggacaatgttcctgactagtaatgtgatcgcaagacaaacgatgttatttctctctctggttatcaatatgtccatctcttcacacgcctgatagaatattatttgacaaaatgatgttataaatctgtgtaattttctcaaatctcggttaaattttcagatgctttgatttttttttaaaaaaataggataacatatagtttggaatggagggaatagaagattcggcttccagccatctcgccgtctgatactgctaccctactcgcacatgtttggggttccaatcagtactcatcaatctgctaggggttttagggctagtttgccaactccattttccctatacgtctcatgtttcgtattcttgcagttaaaaaagaaaaactgggacgataggctctatatccttgtattgcaatccgtaagttcacctgaatcgcaagctacaaggtggttacaagttcagggatggcatcagcccgaaaagggtgatcatggcagggatgagaacaaacatgtgattgacccagttcccaagataaacccaatctagctagcttgtgcatagacgagttatttatacgagtaaaatcgtcgaacaaacaaaatgctcatacaagagattacaaatatcgctaaacatcatcccacacaggcctctatccatcgccatagtccccatagagtcaagtgctttgagaaaacaataagctcccaccaagactctgtactccatccattccaaattagtactcgttttagctcttagttttcatgtctatatatttaaatgattgatggtgaatttagacacatatatacaaaatacatgcatcaattattgtatgaatctattaataatctaaaacg

SEQ ID NO: 4973 - DNA, 3834 bp, Zea mays
gacttgggaacaaaggtaaaaattgaaggtgacatcaatagaggtgtggcatattacaagatagctctatactacaattggcactatgctgatgccatgtataatcttggcgttgcatatggtgaaatgttgaattttgagatggcaattgtcttttacgagcttgcgctgcacttcaatcctcgctgtgcggaagcatgcaacaatttaggagtcatatacaaagacagggataaccttgacaaagctgttgaatgttatcaaatggcactgtcaattaagccacttttcgctcagtcgctaaataaccttggagttgtctatactgttcaaggtaagatggattctgctgctagcatgattgagaaggccatacatgcaacccccacgccggccggggcatataataatctaggtgttctttacagagatgctggtagtattactttagcaattcatgcttacgagagatgccttcagatcgatcctgattcacgaaatgctggccagaaccgtttgcttgcaatgaactatattgacgagggctcagatgacaagctttatgaagctcacagggagtggggaaaacgctttatgaaattgtatccacaatatacaagttgggataactcaaaagttgctgaccgcccattgatcatcggttacttgtctcctgattactttactcattccgtgtcctacttcattgaagctccccttacacaccatgattccacagtttgcaaggtggttgtctactccggtgttgtgaaggcagatgccaagacacttagattcaaggataaggtgttgaaaaagggtgggttgtggagagatatatatggtattgatgaaaagagggttgctagcttggtaagggaggataaagtggacatacttgtggaacttactggtcacacagcaaataataagttagggacaatggcatgccgacctgctcctattcaggttacctggattggctaccccaacacaacaggtttgccaacaatagactaccgaatctcagactcattgactgatccacctatgacaaaacaaaagcatgttgaggagttggtgcgccttcctgaaagctttctttgttatactccttccccagaagctggtcctgtttgtccaacgccagcaatttcaaatggtttcgtcacttttgggagctttaacaatctagcaaagattacaccgaaagtgttgcaagtttgggccagaatattatgttcagtccctaactccaggcttgtggttaagtgcaagccattctgctgtgagaacataaggcagaaatttttggccacactggaggagttgggtttggagtcattacgggttgatctgttgccactcatccatctgaatcatgatcacatgcaggcgtattctttgatggacatcagcctggatacatttccctatgctggtactacgactacatgtgaatctttatacatgggggttccatgtgttacaatggctggtgctgttcatgctcataacgttggtgtcagcttgctcagcaaagtcgggttggggaggctggttgccaaaactgaggatgagtatgtgagcatagcgttggatttggcatcagatgtgaatgccttgcaagaactgaggatgaccctgagggagctgatgatgaagtcgcccgtctgcgagggagagagattcacccggggcctggaagctgcatacatggacatgtggcgcaggtattgtgacggagacgtaccatctctcaggcgcttagcactgttagaggaacatcctgttgccaatgagccagactcggacaaaacctccgagaagcttgcagatctgaaagcgcagagagcaagcgcgactgtggaggaagataaccagcccccagcaatggcgaatggtgtgagatcgcccagttcacccgctgctgcaaaatgtgaatcaaatggtcacagcagccaatgaccaagaacggtgtcacgctccattgatgcagaccgatactgatatattgtaggtcgagtgatgttagcaacatctgtgtttagagggaggggttgttaagctccgggtgtctgatttattgacacttgcggtctgtaaggtgattaaatgtgtcttataaagttcgatttgtagggctttgcccctgtaggttcttgatatggtaacttaagttgcttcattagaaggcgcgggttcccggttgtatatgtagtagaaatatgacagtaaaacaacttgaagagtcgattaaccgacatagatgtcattatgctattttacttccttgtgcgtatcagtctcgtgattactgaccaacatgccggagcagcagccgcttctagctcaacgttgagggccagtaatttatctgtctttgggttaaaaaaaaacccgtgggccatgagcccattaccttatcgccagttgagacatggagctcaccgcatgatcggcccatatttaaacttcattctacgaatattacagtctataatataaaacagttttttgaatgaccatataatgaactgctggacacagtcttaaggttcaaaggttaagggatctatccattgacgattggagggtttaggggttaatgttgggatctgacaacaatgacccaaacaacgagatgacaaacgtgtaatagcacgctagatatggaacaatgattctcaaatgtcttattagccatcctctcacactgtctagacataggtatttatggggtaaccaagggtagccctctaaagtacagccttatccttggttacctgtcacatcttaggatgtggcaccctctaaaatacagacttgtccttggttaccagtcacatcttaagaatatcctttatagcggtgtattttaagaaccattacataccttatattacacccaattacatacccgcaccaacattaatgcacacccatttgtgactagctagaccttccttcagctacaggggcccatgctcctgttgtggcctcgatgttattcattggccccctaagtggggaagccttcaaaaccttcgtcaatgattttatgcgttgtccaagtgacaaggccaaagtctccatcgccttttaagtcactcttggatcggtgaggccttcggtagcatgcccacggcttcgatcgagccacgaatgtttgatgtagatagcagagtccacatgttaagatcttcccagcgaagtccttgccatggccttcggagtcttcgatgggccaagcagccatagactcgatcgaccgtatgacgagtctgcctcacatggggaaatcttcatggtagccctcatagccttcaatgaatccacatttattggagagaagtatgatgactgattagacagtatcgaccagacaaatgatcgggttcccgttcaactttctccccaaaagtagcccctaagggcgaggctcaacctaatgagtcgatcccgaagactagataatgattcgaacgctaccctcgatcatccgatttaggggcatttttatgacatttgttaattaattgattattattttcatcatttctggcttatataaggcaacacccggttagggttagtgttacacgatacgtttgcatcgcttcctcttcctcatatccacaagcgccgctgaactccgtcatgaggccttgcccgcactggtgtgtgagtgaagcataccgcacgacctcgtcaccagtacatgatgtcgtccacttcttcatcaagttctaccagcgactcaccacagtgcgttactaatgcgatgacgaagccaccgccacagacgtacactgtttcagcagacggttcaaa

SEQ ID NO: 4974 - DNA, 1588 bp, Zea mays
ggcgggggccagggtggtcgtcaccgaggcctgcgccgtcgacaaggtgcgcgggttcgccgccgagcgcggcgtgccggtggtcgccgtcgacggcgccttcgacgggtgcctggagctgcgggccctggtggacgccgccgagccgctcgccgccgacgaggaggtcggccccgacgacgtcgtcgcgctgccctactcctccggcaccaccgggatgcccaagggcgtcatgctcacgcatcgcagcctcgtcaccagcgtcgcgcagcaggtggacggcgagaacccgaacctgtacttcagcaaggatgacgtggtgctgtgcgtgctgccgctgttccacatctactcgctgaactcggtgctcctggcggggctgcgcgccggctgcgccatcgtgatcatgcgcaagttcgagatcggcgcgctggtggagctggtgcgcgcgcacggcgtgaccgtggcgcccttcgtgccgcccatcgtggtggagatcgccaagagcccccgcgtgggcgccgccgacctcgcctccatccgcatggtcatgtccggcgccgcgcccatggggaaggacctccaggacgcgttcatggccaagatccccaacgccgtgctcggccaggggtacgggatgaccgaggcggggcccgtgctggccatgtgcctggccttcgccaaggagccgttcgaggtcaagtccggctcctgtggcaccgtcgtcaggaacgcggagctgaagatcgtcgacccagacaccagcgcgtcgctgggacggaaccagccaggcgagatatgcatccgcggcgaacaaatcatgaaaggttatctgaatgatccagaggcgacaaagaacaccattgataaggacggatggctgcacaccggggacattggttatgtggacgatgacgacgagatcttcatcgttgacaggctgaaggagataatcaaatacaagggcttccaagtacctcctgcggagcttgaagcccttctcatcacacatcctgaaatcaaggatgccgctgttgtctcgatgaaagatgaagtcgccggcgaagtcccggtggcattcattatacgcagtgaaggctctgagatcagtgagaacgagatcaagcagtttgttgcaaaggaggtcgtgttctacaagaggatcaacagagttttcttcacggattctatcccgaagaatccctccggcaagattcttaggaaggacctgagagcgcggcttgccgcgggcatcccaagcagtgacaacacacagtccaaaagttgatacgtactttcgtactattcttttctagctgtgccaaaaatcatgctgtgctctattcatgagatggcaatggtatacacaaaacgccaagcggtcgttatcgattcttctagatgggcaagggtaaggtatacttcgtttgtgtccgacatattatgtatttgtatcatgtatagatacgttttgttgacaacaagtgctaattataatgtataccatgtttgggaaaaaaaaaaaaagttacaaagagtcgacccctgtcctgaaaaaaaaaaaaaaaaaaaactcgagacctcgtgc

SEQ ID NO: 4975 - DNA, 4584 bp, Zea mays
  misc_feature (4396)..(4396): n is a, c, g, or t
acggaaagcaccaagatgatcatgcgatatcttgcttacatgggtgggaaggctgcttccgaagggcgaactgtggagaagcaagtccttcagtccaatcctgttcttgaagcatttggaaatgcaaagactgtcaggaacaataactcaagtcgtttcggtaaatttgttgagatccagtttgatcagaaagggaaaatatcaggagctgctgtaagaacttatcttcttgagagatcccgtgtctgtcaaatatctgacccagaaagaaattaccattgtttctacatgatatgtgctgcccctcctgaggagcgtgagagatacaaactcggagatcccagcacatttcactaccttaatcagtccaactgcattaagcttgaaggcctcgatgaatctaaagagtaccttgaaaccaggaaggctatggacattatcggaattagttctgaagagcaggaagcaatctttcgggttgttgcggctattctccacttggggaatgtcgagtttgcagaaggggatgatggtgattcatcaaaacccaaagatgaaaaatctctttctcatttgagaacagctgctgagctcttgatgtgtgatgagaaagctttaaaagattcattgtgtcagcgcattattgtgactcgcgatgagaatatagtgaaaactttggatcctgaagctgctaagggaagtagagatgcacttgccaagactgtgtactcacggttgtttgattggcttgtgaataaaatcaacaactctattggccaagaccccaactcgaaatgcttaattggagtgctggatatatatgggtttgaaagcttcaagacaaacagttttgagcagttttgtatcaacctgacaaacgaaaagctccagcaacacttcaatcagcatgtgtttaagatggaacaagaagagtacaccaaagaagaaattaattggagttacattgagttcattgataaccaggatgttcttgatctcattgagaagaaacctggtggaattattgcccttctggatgaagcttgtatgttgccgagatcgacacatgaaacatttgctcagaaattgtatcaaacttacaaaaatcacaagcgctttgctaagccaaaattatctcggtcagacttcaccatatgccattacgctggagatgtcacctatcaaacggaattatttctggacaagaacaaagattatgttgttgctgagcatcaggctttgttgagtgcttcaaaatgtgcatttgtttcaggccttttcccttttctatctgaggattcctcaaaatcttcaaagttttcatccattggttctaggttcaagcaacaattccaatctctgttggaaactctgagtgcaactgagccacactacatccgctgtgtaaaacccaataatttgttgaagcctgcaatttttgagaaccagaacgttcttcagcaactcagatgtggaggagttatggaggcgattaggatcagttgtgctggatatccgaccagaagaacattctatgaatttatagaccgttttggtattcttgcgcctgatgttttgagtggaagttctgatgaggtcagtgctgtaaggaggttgttggacaagatagatcttcaaggttaccagattggcaagacaaaagtattccttcgtgctggtcagatggctgaacttgatgctcgtagaaatgaagtgctagggcgttcagctagcatgattcagaggaaagtgcgttcattcttggcacagaagaatttcattgcattgcgaagatcagctttacaaatccagacagtttgtcgcggtgaacttgcaagaagagtttatcacaacctccagagagaagctgcttcactcaagatccagactttgtaccgtatgtatactgccagaaaagcgtacaacgaactttctgcttcagcagttaccattcaatcaggattgcgcggcatgtgcgcgcgtaaagagctccacttcagaagacaaacaagagctgcaatcatcatccagagtcgctgccgtcaattcttggcgagattgcattattcaagaacaaagaaagctgcaattactacacagtgtgcgtggagagggaaggctgctagaaaggagctccgcaagctcaaaatggctgcccgggaaactggtgcattgcaagctgccaaaaataaacttgagaaacaagttgaggagctcacgtggcggctacagttggagaagcgcatgcgagctgatctcgaggaaactaaatcacaagaaaatgcaaagttgcaagctgcattgcaggaggtgcaacaacagtacaaagaaacaaaagaaatactagtacaggagagggaagcagccaaaaaggctgcagagatagctccagttattaaagaggtccctgttatagatacagagctaatgaataagcttagagatgaaaatgacaaactgaagactatggtcagttcgcttgaaaagaagatcgatgatactgaaaagaaatatcaagaaacaagcaaaatcagtgaggataggctcaaacaggcaatggatgctgagactaaaatcgttgacttgaacatggcaatgctaaggcttcaagagaaaatatccaccatggaatctgaggagaaagtgcaaagacaagcgcttctaagcacgccagtcaagagcatgtctgaacatttgtcaattccaattgctccaaaggcacatcatttggagaacggctttcatgaggttgaaggacttaaggaaccccaaagtgcacctcctgctattaaggaatatgggaacggtgatcctaagatgaaaaaatctattgttgacagacaacttgaaaacgtggatgcactcattgagtgtgtagggacaaaccttggatactgtgcagggaagccagttgctgctattaccatatacaaatgtcttcttcattggaaatcattcgaggcagataagactagtgtttttgaccgtctcattcagttaataggatctgctatcgagaacgaggatgacaatgacaaccttgcttactggctctccaatacatctagcttattgttcctactgcagagaagtctcaaggctgctggtgctcctggtagcgtttcacgaaagaaacctcctcaaccaacatcattatttggaagaatggcccaaggcttgcgttctgcatcttttgccaacatgcatgttgaagcgacagatgttgtgcgccaagttgaggccaaatatcctgccttgcttttcaagcagcagctaactgcttatgtggagaagatatatggaatcgtccgagacaatattaaaaaggaattatcatctttgatttcgctatgtatccaggctccaagaacaatgaaagctagcatgctgcgagtttctggacgattatccagtcaatctcagagtcagagcaaccactggcagaaaatcattgagagcttggataagctcttgaagatactgcaagataaccatgtgcctccggttttagctcagaaaatatttacccagatattttcatacattaatgtccagctattcaacagtctattgcttcgtcgtgagtgttgctccttcagcaacggagagtatgttaaggctggtctagctgagttggagctgtggtgtgcaaaggcaacaactgagtatgcagcatcttcatgggatgagctcaagcatatcaggcaggctgttggatttttggttatattccagaagttcagaatatcttatgatgagatagtcaatgacctatgtccgatcttgagtgttcaacaactgtacagaatatgtacacaatactgggatgacaagtataatacccaaagtgtttcatcagacgttcttagtaacatgcgggtgctaatgacagaggattctaacagtgatgaaagcggttcgttcttgttagatgataattcgagcatcccgttctccgtggatgatatcttgtcagatcatttattgatttgttgtatattttttggatcctttctaccacatgtgcctttttttagttatcttatccttttgagctagcttttgtaaaaattcatataggtatttgttagggttgggatgggattccgcccttacagttagaaaaggccttatcttttaaagcggggcaaatgattctttgtagggcaacatgaaatcaatctttttacccaagggtgtggtgagaaggggtagatgcaatgtttgtagcctccccagttatagattgtgtaaattatatactgtaaatcaacagtgcaatggaaaagaaaggaaagctatatagcaagtgcagttatgttgtcaaaaaaaaaaaaaaaaaaaaaaaaaaaaaaaaaaaaaaaaaaaaggacaatataaaaaaaaaaaaaataanagaacgcgtacatgaaaaaaaaaaaaataatattttgggggggcctccataaaattcactgttcgtggcttttcaacgcagggccttggggaaccctttggttccccaacttaatataaatggcccgcgttcccccttttttagccgtggggaaaacccgagggttccccatctgattgcccttccca

SEQ ID NO: 4976 - DNA, 3367 bp, Zea mays
  misc_feature (3361)..(3361): n is a, c, g, or t
aattcggcacgaggttcggacttcctgcgctccgccaattgcttcctactccacctcctcttctccctccccaagccgccgccgccgccgccgcctcatctcatccccatcacccactcccggcggatcgtcgatggcggcgccggcgatatggcagccacaggagcaggggctccacgagatctgcaccctcctggaggcgcacatctcccccaactccgaccaggcccgcatctggcagcagctccagcactacagccagttccccgacttcaataattacctaaccttcatcctggcccgcggagaggggaaatcaattgaagttagacaggcagctggtctactactgaaaaacaatctgcgaacgactttcatctctatgcaaccttcgtcccagcattatgttaagtctgagctgttaccatgtataggggcaaccaatagggctattagatccacagttggaacagtgatcagtgtacttttccaaattgtacgagtcgctggatggattgagttgtttcaggcactccataagtgtttggagagtaatgacctggatcacatggaaggtgctatggatgcgatatacaagatctgtgaggatgtccctgaagagctcgatgttgatgttcctggtttgtctgaacgaccgatcaatgtgtttatgccaaaaatactgcagttcttccagtcaccacatgcaagtttgagaaaactatcgttgggttgtataaatcagtacatagtagtgatgccatcggcactctacatgtctatggatcagtatattcagggattattcaaccttgcaaaggacccttcagcagatgttcggaaactggtttgttcagcctgggttcagctcattgaagttcgcccatctattttggagtcacatcttaaaaatgttactgaattgattctgcaagctaataaagatccagatgatgaagtcgctctggaagcttgcgagttctggtctgcatactgtgatgtgagcatgcctcctgaaggtttacgggagttcttgccacgcttaatcccgactttgttgtcgaacatggtatatgctgatgatgatgagtcccttgatgatgctgaggaagatgaatcctttccggacagggaccaggatttgaagccccgctttcatgcctctcgattgcatggatcacaaactggagatgatgatgatgatgatgatgctgtaaatgtctggaacctgcggaagtgtagtgctgctgggttggatgttctctctaatgtgtttggtgacagcatccttccaactttaatgccattgattgagcaaaacttggctcgaacagatgacaattcttggaaggagagggaaactgctgttttgtgtctaggcgctatagcagaggggtgcattggtggtctatacccacaccttcctcagattgttgccttcctaatcccacttcttgatgataaatttcctcttatacggagtattacgtgttggacgctctctcgatatagcaaattcattgttcagagccttgatcatccaaatggacgtgaacaatttgataagattctcatgggattgctaagaaggatattggatactaacaaaagagtgcaagaggctgcttgttcagcgtttgcaactcttgaagaggaagcttctgaagaattagtaccccacttggaagtaattttgcagcacctcatgtgtgcctatggaaaataccagagacgaaatcttcggatactctatgatgcccttggtaccctggctgatgctgttggagcagaattaaatcaggcaaaatatctagatatatttatgccgcctttgatcacgaagtggcagcaactttccaattctgacaaagatctatttccactccttgaatgctttacatctattgcacaggcattgggaccaggatttgctcagtttgcggaaccagtgtttcaaaggtgcatcaatcttatccaatcgcaacagttggcaaagattgatcctactgcagctggtgcggtgtatgatagagaattcattgtttgttcgttggacctactgtctggacttgcagaaggtcttggcgctggtattgaaagtcttgttgcacagagcagtttgagagatctgcttttgcaatgctgcatggatgaagcagctgatgttcgacaaagtgcccttgcccttcttggagacctttctagggtttgcccaatacatttgcatccacgtcttcaagaatttcttactgttgcagcaaagcaactgaaccctcagtctgtgaaggatgcggtatcagtagctaacaatgcctgttgggctattggagaattagcaatcaagattggcaaagaaatagcacctgtggtgatcaccgttgtttcgtgcttgattaccatcctaaaatccccagagggtttgaacaagtcacttgttgaaaatagtgcgatcactcttgggaggcttagctgggtctgtccagacatcgtggcccctcatatggagcatttcatgcaagcatggtgcagtgccttgtgcacgatcagagatgattttgagaaagaggacgcgtttcatggactgtgtgcaatggtggcagcaaaccctacaggagccgctggttcattagcttacatctgccaggcctgtgcaagttggactgagataaaaagcgaaggtcttcacaatgaggtgtgccagattctgaatggctacaagcagctgcttggaaacaacggtgggtgggaacaatgcatggccgccctgaaaccagatgttgtgcagaaattagctagatacggagtatgatgagaagcaagctcgtgtggtttattcacctcatacaccgaccatcatctttatggcggagacaagagaggagcagaaaggggtgggggtcgtcgagagtgtctctgctgctgatgcatcatctttacatgtgtggcacttgagagtcgattcggttcgttggtacgccattgtccgttcgttcattgttatactggttggtgcacagcatttccagagcgagagtaggatgtcttggtaaaccccccatgtgtattggttggttgggccagtggacttggttttggtttttttgtcattcctactggcaaacacaacaaggccaccaccctcttgctcgccccaccccggcaacattgagaaaacagaggttttgtagcgtgtaattctctctcttttcttggtttcttattattattaggtgtaggattgttttcgagtcttgtttggcaggaagggtttgtacgagaaatcaattgattgctcactcaccacaaaataataaaaaagatcgatcgatggggcttgtatctcctacggctaaaaaaaaanaaaatt

SEQ ID NO: 4977 - DNA, 1987 bp, Zea mays
ctcgagtttttttttccctttttttttttttttttttttttttgaagagaatccattctggccgtttactggttcgaaggtgaagccatactttatagttccacgccatttacatctcatttccacttcttttatttaatgctccgcggcttattcgatttattctaaaactgctctcccacagccatcatgaccgatcttgcagctaaacgcaactcacgcccttctaagcacgcctggtttctccgttcatcatctgccgagtgtttcgagctagaggccgacttcaggactcaacccaagttgcccatgcagatgtacttgagctccaagtactcgtcaatgccgtacttcgatccttctctccctagaccagactgctttactccgccaaatggcgccacctccgttgaaataatcccctcgtttaccccaactaagccgtactcaagagattcagatacacgccatgaacgaggtatgctcttggtaaaaatgtatgcagctaagcctgcgtttgtatcgttggccatatggactgcttcttcctcagttttgaacggtataaggggtgcaactggaccaaaaacttcttctctgaaaagaagcatatcgttgctgacattccctactacagttggctcataaaatgacattcccaggctgtgtcttttaccacctagcatgacatttgctccctttgaagttgcgtcatttatgaacttctccaccttttgaacagcagcttcgttaatcagaggaccctgagatgtactctcttctagaccgttaccgaccttcaaactctgaacagcctggatgaatgcttttgcaaacttttcgtagataccttcttgcaccaatatcctgtttgcacaaacacatgtctgtccactgttacggaacttggcagcaagactgcctttaacagcaacatcaatgtccgcatcatcgaaaacaatgcaaggtgcattcccaccaagttccaaggagacctttttcacagtatttgcagatccagccatcagttttttgccaacagctgttgatccagtgaatgtaatctttctgacctgtgtactctgcagcaacgcatcacctatctcagcagcattacccatcacaacattcaatgcacccgctggtattcccgcttgaagagcaagatctgctgcagctaatgctgtcagaggtgtgaactccgatggcttgacaacaacagtacagccacaggccaaagctggtccaaccttccgggttatcattgctaatggaaaattccatggtgtaatagctccaactaccccaacaggctgcttcaaaaccaacaatctgcgatcagataaagttgggggaatgatgtcaccatatatacgctttgcttcctctgcaaaatattctatgaaacttgcaccataattgacctcaccaagggcttctttcataggtttcccctgctccagtgtcatgagaagtgcaagctcttccttgtgtgaaataattagatcgtaccattttcttagtgccttgctcctctcacttgcagtgaatttactccaagaatagaatgtactgtgagcagaagcaatagcatcagatgtttctctgctgcccatacaggacacgtttgccaggacctcaccagttgctggattttgcacctcaatggtctttccgtcgtaggcgtccacccactgcccagcgataagcccctgcgtcctgagcagcccggcggcgcggatcttctccatcgcggcgcccgcgtccgcgctcatgtggcggagggagacgactcggaacgaagaggctgcggcggcggggatgtggcgagcgccgagcgccaccgcgcgtcgcatagccatcatcgccatcgccatttagaacctggtatcgactatcgagacgggggggaggccggatgggggtgcgattgggatctaggaagtacgcgactcgtgccggcggcggacgccggagggaagggccc

SEQ ID NO: 4978 - DNA, 1824 bp, Zea mays
tgtcgccggccgacgcgtcagccacccaccctcgcgatcagacggccatggccataacgagctccaagatctgacggcgcagatccgtttctaaacccgtatatattcggccgggtacctcgggcccggccgctctcttttccgccctccacccctcgcgagctctccacccctccacacgaccctcctcggcggcggcggcggcgatgcagatggcggcgaccaccaccgagtcccaggcggccgtgccgcctcaacaccctcacgcccacccccacgcgcccccgcagcatgctcacccgcaccaccacatgccgcagccacggtgggtcgtcatcccgtacccgccgccgccgcccatggtggccgcgccaccaccgccgccgcagtttgccaagcacttcgctgctgggccgcccccgccgccccaagctggtgctgggcgccgcacgccgaccccgccctcgtctggatccggcgggaacgggtgcgaagaaaataaaaccatttgggtcggtgacctccagtactggatggatgaaaactacctacataactgcttcgggcccagcggcgaggtggttacaataaaagttatccgcaataggcaaacaggacagtcagaggggtatggatttgttgagttcttttctcatgcatcagcagagaaagctcttcagaattttactggtcatgtgatgccaaacactgaccggccatttaaattgaactgggcatcgtatagcatgggtgaaaagcgatctgaagtggcttctgatcactcgatatttgttggcgatctagctgctgatgtcactgatgaaatgctgctggagcttttctccagcaagtaccgctcggtgaaaggagctaaagttattattgatgcaaacacaggccgttccaggggctatggatttgtcaggtttggagacgacaacgacaaatctcatgccatgtctgaaatgaatggtgtatattgctctacgaggccaattcgtataggacctgcgactcccagaagatcttcaggtgattctggctcctcgactcctggtcattcagatggtgattcttctaacagaacggtatatgttggtgggcttgaccccaatgtcagtgaagatgaactgagaaaagcctttgccaaatatgatcttgcctctgtgaaaattcctctaggaaagcaatgtggctttgttcaatttgttagcagaactgatgctgaagaagcactacaaggattaaatggatcactcattggaaagcaggcagttcgcctttcatgggtccgcagcccatcgcataagcagtctaggggtgactccgtcaacaggaggaacaacatgtactatggcacaccattctacggcggatatggctatgcctccccggtgccacacccaaacatgtacgctgcagcgtatggcacgtacccgctatatggcaaccagcagctagtgagctagagagctcccctccgacgtgtcccctctgacgggaaacaaaggttttggtccggtgagcatagtagcgtcaggtgagaaggtgcctttataaggctgtcctaagaagtgggcgagatatgttgttgcatcgttatcgttatggtgcctgtaactgttgtgtgtgccgtgtgcgtccggaagaattggatggaatggaactcgtggcttgttgtagtacatcaaagagtcatgttattctttcaagaaattttgacttggtaataaattaaactattgtttgtgcgtccaaaaaaaaaaaaaaaaaaaaaaaaaaaaaaaaaaaaaaaaaaaaaaccccaaaaaactcgagaggggg

SEQ ID NO: 4979 - DNA, 2421 bp, Zea mays
cagtccttcagatctcccctcccttcctgtccttctctattatagcaagcaaagcgccactcgcaatcgcaacccaccaccctcaggtcaggcctcgctcagatctctccgccctcgtcccccctcacaccccaaaccctcggcccgcctctctcgtcaacgccgcccgacgagagcgatggcggcctcgccggccgcggccgcggcactcctcatcctcttcgccctcggggcggccggcggagtggcggccgacggctccgaccaccggtacaagatgtacgagcccgtcccgctctacgccaacaaggtcggccccttccacaatcccagtgagacatatcgttacttcgacctgcccttctgctctcctgagaaagtgaaggagaagagcgaggcccttggcgaggtcctcaatggggatcggctagttgatgcgccttacaagcttgatttccgttcggaagttgagtccaaggcggtttgctcaaagaagcttaccaaagaggatgtagtgaagttccggaatgcagtagcgaaggactactacttccagatgtactatgatgatctcccactgtggggcttcattggtaaagttgagaagggaggcaaggccgatccgagcgagtggaagtactacctgtacaggcacatcatcttcgatatcctgtacaacaacgaccgggtgattgaaatcaatgtgcacactgatcagagtgcattggttgacctgacggaggataaggagacaaatgtggatttcctgtactcagtcaagtggaaggagacaccaacaccatttgagaagaggatggagaagtactccagctcctccaacatgccgcaccacctggaggttcattggttctcaattataaactcttgtgttactgtcctcctcctcacagggttccttgcaacaatcctcatgcgagtattgaagaatgattttgtcaagtatgcccatgatgaggaagcagctgatgaccaggaagagtctggatggaagtatattcatggtgacgtcttccggttcccaaagaataagtcgctattttccgctgctcttggcacaggaactcaattatttgcactcacaacctttatatttcttcttgcacttgttggagtattctacccttacaaccgtggtgcactatttactgcattggttgtcatctatgcactcacttcaggaattgctggatacgttgctacctctttttattctcagctggaggggacaaactgggtgaggaacttgctattgacaggatgcctgttctgtggacctctcttactgacattttgcttcttgaacactgttgctattgcttatagtgcaacagcagcactgccctttggcactatctgtgtcattgtgctcatctggaccttggtcacgtttcctttgcttgttttgggtggtattgctggtaaaaacagcaaaagtgagttccaagctccttgccgtaccacaaaataccccagggagattcctccacttccctggtaccggagaaccattccacagatggctatggctgggttcttgcctttcagcgccatatacattgagctatactacatctttgctagtgtttggggccacaggatctacacaatctacagcattctgtttattgtcttcatcatcctccttattgtcaccgcgttcatcactgttgcactgacatacttccagcttgctgctgaagaccatgagtggtggtggaggtcattcctttgcggaggatcaactgggtttttcgtgtacggctactgcctgtactactactatgcgcgatccgacatgtctggcttcatgcagacatctttcttctttggctacatggcctgcatctgctatgcattcttcttgatgctcgggatggtgggcttccgcgccgccctgttctttgtccgccacatatacaaatcaatcaagtgtgaatgagctgttgctggggagacgaagagcagcagagttgtacccgtttttggtgccccaccgagaggtcccagatatagaaaaggttagctctcgcatgcgacaggagcagctagagattgccatgtttcagagtaggccaattatttataggaacaggtaatgaacctataaatttgttctgtttttgtgactgctgtgataaaaagaccgtctgttccttcgtcctatgtatcatctcctagtgacgtcagacagcactataactttgttggaaccgtgacatgcctgaatatctgtggaaaaagaaacccgtgttatgttgttatatatgttctctaaagcatagaataatagaagtgtagacctctagtgtggcaggttcatctgtacgtgtatcctcttcgttcttgttcactgcggagcgttggactctatacatacccccagacttttggtactgttgt

SEQ ID NO: 4980 - DNA, 1435 bp, Zea mays
gtcgacccacgcgtccgcggacgcgtgggcggacgcgtgcctccccacccaccaccgcgccgggccaccaccacccactctaccctcccctccccaccaccactagcacccaccgtcccggcgcggagaccgcttccctccctccgcctccgcaaccctctcccgcctcgcccgcgcctccctccatttgtccgcggctcccctccctcccgatcttaaccacccgccacccggcttcctctcccccttcttcctccctcaaaccagacgctcgcccccctttcctccacctatcttcttcagacgaccagcaggaggtacgagcaagaccacctaggaggcctctctctctctctccccagccacccccgtagcgagagggagggcggaagaggatgagcgcgtccaggttcataaagtgcgtcacggtcggggacggcgccgtcggcaagacctgcatgctcatctcctacacctccaacaccttccccaccgactatgttccgacagtgtttgataacttcagtgccaacgttgtggttgatggtaatactgtcaacctcggcctctgggacactgcaggtcaagaggattacaacagactgagaccactgagctatcgtggagctgatgtttttcttctggctttctcactgatcagtaaggccagctatgagaatgtttcgaagaagtggatacctgaactgaagcattatgcacctggtgtgccaattattctcgtagggacaaagcttgatcttcgagacgacaagcagttctttgtggaccatcctggtgctgtccctatcactactgctcagggagaggagctaagaaagcaaataggcgctccatactacatcgaatgcagctcgaagacccaactaaacgtgaagggcgtcttcgatgcggcgataaaggttgtgctgcagccgcctaaggcgaagaagaagaaaaaggtgcagaggggggcgtgctccattttgtgatctaatcatcggtagatgaagaaacaagggcgaaggtgccatggctttatcatcgtcgcgtcttgcttcagtggaacggcatggatggtccccaccccccctaggtttactggcggctcggctgcagcgagttctcatctctttgtcgaggcattaagcgatatgtttgtttcattttcctccttcctgccttgtgattatctggtgtgtgtgtgtgtgtgactgacgaagtcgcggcgattaggtaactcgcttagaaggtatttcccgtgtttgagcaaaagaaagtatccctgttatctctgttccataagttagacatgatgtaatcgtactaagtttatttttacttatttcacttgaatggaaaagtatgcttcccatttaaaaaaaaaaaaaaaaaaaaaaacacgaactagtctctacgagggggggcccggtaccca

SEQ ID NO: 4981 - DNA, 761 bp, Zea mays
  misc_feature (1)..(1): n is a, c, g, or t
  misc_feature (9)..(9): n is a, c, g, or t
  misc_feature (15)..(15): n is a, c, g, or t
  misc_feature (46)..(46): n is a, c, g, or t
ngtgccatnacgtcnttcttatccgattggccttccattccttctntaaataccggccggcgccgaaccggccggaaagaccaccgacgcgtagcacagtccattattgccgtctcccttttgcgtgagcaaagaaagagagcgagaagagcagtcgccatgtctggcatcatccacaagatcgaggagaagctccacatggggggcgaccacaagaataaggaggaggagcaccacaagaaggccgaggagcaccacaagaaggaggagggggagcaccacaagaaggacggcggggagcacaaggaaggcatcgtggagaagatcaaggacaagatcaccggcgagcacggcgacaagtccggcgaccacaaggaaaagaaggacaagaaaaagaagaagcacggcgagggccacgaccacgacggcggccacagtagcagcagcagcgacagcgactgagatctggtgtcgcagcacaggtgcaacacatgtatgcttgctggatggaggattcataccagctgatgctgatgtagtgtttcactggtgtcatgcatgtatcgtgctattataatcaaaaagaaaaaagaaataacagtcagggatggtttgtttgccatgtgatcttgtacactcctacttaaattatggctgctgcacggtgctgctagcttgtactaataaagtgttgatctgcatgcttgcgtcttaaaaacacgaattcatgaacaagacggatcgaggagatccgcgtcttt

SEQ ID NO: 4982 - DNA, 1492 bp, Zea mays
gcacgagctcctccactctccctccatccatttaccaccccaccccgccgccgccctcctcttctctcccctgagcctgactggaaccttcccgagagaggatacaaaggcacccggatcggcggcacgaacgcccgggattccattccattccattccacacaaggctaggcacaagcgaaccaaacccatggcgtccgacggcagcggcgtggtgacggtgtacggcagcaacggcgcggagctgctggagccgtccaagcagcccaagtcggcgactttctccgtcaaggtggggctggcgcagatgctccggggcggggtcatcatggacgtggtgaccccggagcaggcgcgcctcgcggaggaggccggcgcgtgcgccgtgatggcgctggagcgggtccccgccgacatccgcgcgcagggcggcgtggcgcgcatgtcggacccgggcctcatccgcgacatcaagcgcgccgtcaccatcccggtcatggccaaggcccgcatcgggcacttcgtggaggcccagatcctggaggcctgggcgtcgactacgtggacgagagcgaggtgctgacccccgccgacgacgcgcaccacatcaacaagcacaacttccgcgtccccttcgtctgcggctgccgcgacctcggcgaggcgctccgcagggtgcgcgagggcgccgccatgatccgcaccaagggggaggccggcacgggcaacgtcgtcgaggccgtgcgccacgtgcgctccgtcatgggcgacgtccgcgcgctccgcagcatggacgacgacgaggtcttcgcctacgccaagcgcatcgccgcgccctacgacctcgtcatgcagaccaagcagctgggccgcctccccgtcgtgcagttcgccgcggggggtgtcgccacgcccgccgacgccgcgctcatgatgcagctcggatgcgacggcgtcttcgtcggctcgggcatcttcaagagcggcgaccccgcgcgccgcgcccgcgccatcgtccaggcagtcacccactacagcgaccccaccatcctggccgacgtcagcacggggctcggggaggccatggtcggcatcaacctcaacgacccaaaggtggaacgatacgccgccagatccgagtgaaccctttctttccgtagtcatctccatccatccatctgccttggattgcatttccgtcgtctcatgtctctcaatcagtaataatggaatgaatgaaatggtaagaaacaaagctatggtactatgcagaacctctttaattttgtgctactgtactaagttagcctagtccccacccccaccctggattatcatgtacccaaatgttggatggattgtatgtctgtcactgagccagaccttcttattgctatgaacgatgaatcaatcctctttctcgaggctaagacggctaaaaaacttgatccggttgccatatcggaaaggttaagtgaatcacatcatcagg

SEQ ID NO: 4983 - DNA, 2288 bp, Zea mays
  misc_feature (2286)..(2287): n is a, c, g, or t
ctttcccttcctcgtgccgacgaccgggcgaccgccgcgccccggcccgcgcccccttgtctcgggccactcgccggcaacgagcagccaccaggaaatgttgtgaggactgaaaagcaggctcctgcaggaccatggacggatgtgattgcatcgagccactatggcctaccgatgatctccttgtcaagtatcagtacatctcagacttcttcatagccctcgcgtacttctctattccgttggagctcatatatttcgtgaagaagtcgtccttcttcccgtacagatgggtcttgatccagtttggtgcgtttatagttctctgtggggcaacccatctgataaacctgtggacgttcaccacacatacaaagaccgttgcgatggtcatgaccatagcaaaggtttctacagcagttgtgtcctgtgcaactgctttgatgcttgttcatatcatccccgacttattgagcgtgaaaactagagagttgttcctgaagaataaagctgaagagcttgacagagagatgggactgataaggacgcaggaggagaccggtagacatgttaggatgcttacacatgaaatcagaagtactcttgacaggcatatgattttgaagactactcttgttgagctaggaaggaccttgggtctggaggaatgtgcattgtggatgccatctcgaagtggttcaagccttcagctttctcatactttgcaccaccagattactgttggatcatcggtgccaattaatcttcctgtcatcaatcaagtgttcagtagcaaccgggcaattataataccccacacatctcctttggcgcggattcgacctcttacagggcgatatgttccaccagaagtggctgcagtccgtgtacctcttctccacctttcaaacttccaaataaatgattggcctgagctttcggcaaaaagctttgcaatcatggttttgatgcttccatctgatagtgcaagaaaatggcatgtacatgaattggagctggttgaggttgttgctgatcaggtagcagttgcactatctcatgcggctattcttgaagagtccatgcgagcacgtgatttactaatggagcagaatgttgccctggatttagctcgaagagaggctgagatggctatccgtgctcgcaatgattttctagctgttatgaatcacgaaatgagaacacccatgaatgcaataatagccctttcctccttgcttttggaaactgagcttactcctgagcagcgtctaatggtggaaacagtactgaaaagcagcaatctgttagcaacactcatcaatgatgtgctagatctttccaaactcgaggatggaagccttgaactggagattaaagcattcaatcttcatgctgttttcaaagaagtgatgggtttcattaaaccaattgcatctatcaagaggctatctgtatcggttatgttggcaccagatttgccgttatgtgccattggtgatgaaaagagactcatgcaaactattctgaacatctctggcaacgctgtaaagtttaccaaggagggacacatcacacttgtagcttccattgtgaaggctgactctttgagagagttcagaaccccagaatttcatccaactgcaagtgatgaccatttctatttgaaagttcaggtaaaagatacaggctgtggaattggtccacaggatctacctcatgtatttacaaagtttgctcatcctcaaagcggaggaaaccgagggtttaatggtagtggtcttggccttgccatatgcaagaggtttgttagtctcatgggagggcacatctggattgacagcgaaggaaccggaagaggttgcaccgcaacattcgtcgtcaagctcggcgtgtgtgacaacacaaacacctaccagcagcagctgatccctctagtatggccaagcagcgcagactccgatttgcgtgctccgaaacctcttccggacgggagaggatctactcccttgaaatctcggtaccaaaggagcgtatgagcctagtgtaaatgattgacggcatagtgccaagtaggggaccgattagtgccaccgtctaattttgtttgtaaccctgtcatagcaggcatatgatgtacaaatactgtaaagcaaatggagactgcggccgtgtatctgggtggcaacgctgacttgctgcattgagtggtatatacatatgctaccagcggattgaattgcttaaaaaaaaaaaaaaaaaaaaaaaccgtgtgcgaccaccgtnng

SEQ ID NO: 4984 - DNA, 2139 bp, Zea mays
gaagctctttttcttctcgagtagcagcgcgccccctccccgccccacactaaaacagccacacgctcgccacccatggccaccaccaccaccaccaccacagcacaggcccactgccaccgctaccgctaaccatggcctcctcagcgtccctgcagcggttcctcctgccctcctcgcacgcggcggcgacggcggcctcgccgtcctcccggctgcgccgcacagggcgcgcccgcgcggccgtctccgtgccgccgccggcggcggcgggggagcaggtcccgacggagcggctggagccgagggtcgaggagcgggcgggcgggtactgggtcctcaaggagaagtaccgggcggggctgaacccgcaggagaaggtgaagctggagaaggagcccatggcgctgttcatggagggcggcatccaggacctggccagggtccccatggagcagatcgacgccgccaagctcaccaaggacgacgtcgacgtccgcctcaagtggctcggcctcttccaccgccgcaagcaccagtacgggcggttcatgatgcggctgaagctgcccaacggcgtgacgacgagcgagcagacgcggtacctggcgagcgtcatcgaggcgtacggcgccgacgggtgcgcggacgtgaccacccggcagaactggcagatccgcggggtgacgctcccggacgtcccggccatcctggacggcctccgcgccgtcggcctcaccagcctgcagagcggcatggacaacgtgcgcaaccccgtcggcaacccgctcgccggcgtcgacccccacgagatcgtcgacacgcgcccctacaccaacctgctctcctcctacgtcaccaacaactcccaggggaaccccaccatcaccaacctgccgaggaaatggaacgtctgcgtcatcggctcgcatgacctgtacgagcacccgcacatcaacgacctcgcgtacatgccggccgtcaaggacggcgagttcggcttcaaccttctggtgggcgggttcatcagccccaagaggtgggccgaggcgttgccgctcgacgcctgggtcgccggggacgacgtcgtccccgtgtgcaaggccatcctcgaggcgtaccgggacctcggctccaggggcaaccggcagaagacgcgcatgatgtggctcatcgacgagctcgggatggaggtgttccggtcggaggtggagaagaggatgccgaacggggtgctggagcgcgccgcgccggaggacctcgtcgacaagcgctgggagcggcgggactacctcggcgtgcacccgcagaagcaggaaggcctgtcgtacgtgggcctccacgtgcccgtgggccggctgcaggccgcggacatgttcgagctggcgcgcctcgccgacgagtacggcaccggcgagctccggctcacggtggagcagaacatcgtgctccccaacgtcagcaacgagaggctcgacgcgctgctggcggagccgctgctgcaggagcagcggctctcgccgcggccgtcgatgctgctcagggggctggtggcgtgcacgggcaaccagttctgcgggcaggccatcatcgagaccaaggcgcgggcgctgcaggtggcgcgggaggtggagaagcgcgtggccgtgccgcggccggtccgcatgcactggaccggatgccccaacagctgcggccaggtgcaggtggcggacatcggcttcatgggctgcctcaccaaggacagcgacggcaagatcgtcgaggccgcggacatcttcgtgggcggccgcgtcggcagcgactcgcacctggccgacgtctaccggaagtccgtgccgtgcaaggacctggtgcccatcgtggccgacctcttggtggagcggttcggggccgtgccgagggagagggaggaggatgaggagtaggaccttcgtcaagcgccggctgggactgtcctgacctattttatgaggtcttgattggatgtatatatatattcatcttaatctatatggatttctgaagtttgatctaaagtagacgcgctgccttcttccatggcacgatttgttttggtattgtcgtagcaacaaaatgtccccttattcacgtcacagagaataagtgcacgcttca

SEQ ID NO: 4985 - DNA, 1980 bp, Zea mays
  misc_feature (1964)..(1964): n is a, c, g, or t
tcgagttttttttttttttttttaatataagttttaaccatcaataataccaatagcataagccacaatgactgaaagtaagaacgttctgtccgaactagtataaatcttacattctccaccgcgtacacgctccaaaactcagaatacgcacaataaatttaatttacttgtcgagcaagattcgaaacaccaagaagtagattctcacaaaaccatagtatcatctacgataaatttcttcatgtttgaacagtatcaggcgcacatttcaatttgtaatatggcgctcgaaaactacacttaacctgtccaaaaacattgggttaatcctcatctttcctgggagacttgaaattagcaacaagacgacgacgaccggcatcatgagctcacggtcgtatccatcttggaggcgtcttcgatgcccttgaaggccacacggagcttcctcaacgaggacactttcttcccgttgttctctgccatgcccgtggcatggacagtggtgtatgggacctctttgagaagctcaaacatggggatgctcaggtttggccgtgtcatctgctccagcacctccggtgactgcatgtacaggttgttaccttcgtgcgtcacgctggctttcgacatccgcaacttggggtgctcttcaagcatcttgatgaaatctgaaagagtagatgacgtatccagctcaacaagggtaccaggcccacatacaaggcaatctttgtctctgacaaactcagttactttaatgtgtgttccttccagaccgttgtacgtgagatagtttgacacacttttgctgcacccagaaataagctttaaggcttccaatgcacaagcagccgatataattgcattcgttgatgcaatggctgggattatatttttgacaacaccctgtgtcaaagaatatgtaacaccagaaataccgaaaagctctgctctctttaaagcctctgaataaatccactgcatatgctctgcatcatcgccatcaaaaggttttccaggatgaacctcatcccatttgatcaagtgagcatactcaatgcagtgagctgcagttcttggtgtctcggcgagagtacataaagggaacttaacctgtggaggaaaaagccatatgttgcattcaaagcaaggtgttgttccaggtataatgactctagcgtgtcccttgaagccctcagttccaccatctaccataggtttaaccgtctcttggagtggattgtcacttgagtcataatctaagaaaccacaagccacagaattgatgtagcttcgagcttcaattgaatccagacctaggacaattatgtggaactgactgtagaactctatctctttatcttcaatcctgcaaaaatgaggaactatgttcaccccattaactcgctccataaccctcttcgctgctacttcagccttggacttcccaacatcttgaactctgaagagaaactggcgattgaggttggagacgtctatggtgtccatatcaatgacgtgcagtttcttaaacccggagagagccaggtccttgaggagctcgcagccaagcccgcccgcgcccacaaccaaaacctccacgaggctccccagtaggtctcgcaggccggggctgggatcgaaagtggcctccacgaggtttccagggcgggacaagagcatgtcgaggtcacgccaccgctcgagttccgtcggcgccggctgttccgcgtcaggggaggccatcgcggcggcgctctggatttggctctccttcgagcagcggggaggatgagtaagggggcagcgggatgcgcggctttgatggagataatcggcgcacctgggcaccgaccaccgagcagccgaggtttggttgtggtttcttcgaaaaagtaaataagctcaactccggttccgctgccggcccggccggatccgagggacccaatcgcccncccccccccccccccc

SEQ ID NO: 4986 - DNA, 1465 bp, Zea mays
  misc_feature (1455)..(1455): n is a, c, g, or t
ccgggatggaggctttcctcctgaagccattatctattcttaggtgattatgttgatcgaggcaaacaaagtttggagactatttgccttcctcgtgcccgcccgacccagtaccctgagaacttttttcttctgaggggcaatcatgaatgcgcctcaataaacagaatatatggattctatgatgaatgcaagcgtcgatttaatgtgcggctatggaaggtcttcacagaatgttttaacactctacctgtggctgctcttatcgatgataaaatattatgtatgcacggcggactctctcctgatctagcacacttggatgagataaagaacttgcagcgtccaactgatgtaccagatcaaggtctactgtgtgacttgctttggtcagatccaggaaaagatgctcaagggtggggcatgaatgatagaggggtctcatatacctttggtgctgacaaggtttcagaattcttgcaaaagcatgatcttgatcttatctgtcgtgctcaccaggttgtcgaggatgggtatgaattttttgctgacagacagcttgtcaccatattctcggcccccaattattgtggtgaatttgataatgctggtgcaatgatgagtgtcgatgaaactttgatgtgctcattccaaattctgaaacctgctgagagaaaaaacaaatttatggggtccaacaaaatgtgatagtgaaagccattttgcttccagcagctctagcctcttaaggttctcctgtggatgcatcgagacaacagcatgctggcgccaagtttgagggcagcattgggctactatcagagaaaccaaataatcccatacctaactgttcatctggaagttactcatcatgacaagtgcctgaaatttttcctctttcctgttaccttgtgtcagaacattatgtagctgtagatatattgattatggaaggatgaagttgccaaattgacctgaggagattcctttctccagccaggaaaaattctgaacatcaaggagtttctgtttgcaagtttcactatttaaaagcagttatgttgcttgtgcggaggtaagtactggaccgaggcagtattatcagtttcatggatatggactgttgtgatagtttcgatagaggtgtcaaacatcaattagggtgaagtggtgagcaacatttcaaggaggtgctgatgcttgctgacaacctatgaaaaggcgtttctgtagctgactacttggtttgtccgtcagacaattctagacgtgaattttgatctgttggctagattagctgccaagtaggtatttcgtatctctagatttatgggattcacattcactcgttcttgttgctattcacttgcctttgttatgttgctacatgggtgccaaacgcggtctgcaaagcagtcgtttcggtttgtttggtaatgcattttgcgcaaaaanaactcgaggg

SEQ ID NO: 4987 - DNA, 3641 bp, Zea mays
gcctggctctggcttctgccatcccactcagcagtgccaaggcccagcgccgaccgagccttcccctcgcctgatctgcgcgtccctgtcctcggctcctgagcactcgcgtactcgctcgtcgcatctgcccacactaccactggccacaccgaaaccctagctgcgcacccaaatcgatcgatccagggacggcagcggcacgacgcgccaaaataggttcagaactagcgtcgcgacaaaatcggttcacgaccgccacggttggaccagctgcgccgtggccgtgcggctgtgcggccggcattggcgcgctgcgcgctgctgcaggccggtgtgccgcgcggctgggcgacgtgaaacggatccacatcgtaggagcagaacttgctggtcgaggtggaggcttgctgcgtgcagcaggacagggagtcagggacaacagattttagcaaagtatgagctgtgaactagtgttagaggaaagcacgaaggaaatagtggcataaaacttgatttgtctaaagataaattggtttcttaaaatggctcagcaaatggcttcagttcatttgaatgatacaacagttgttgatgccaagcccttgcgtacattaactcccatgttccctgcaccactagggcttcacacgttcactcctcagaactcaccttcagttgtttgtgtgaccccatttggaccatatgctggagggactgaattggggatgcctgctgttccaccaatgtttgcagcgcctgtacctgctgcaggagcagaacccagccagagacagccgcatacagctaatatgaacggaggagacactgaattggggatgcctgctgttccaccaatgtttgcagcgcctgcacctgctgcaggagcagaacccaaccagggacagccgcatacagctaatatgaacggaactgcagtcaacagttcggtcacatctttgcaaactcctccttcagctgccacacaggaatctggtaagaggaagaggggcaggccaaagcgtgtgcctgatactactgtttcttcggctccttcagctcctctggctcctactatttctccagttccttcacttcctgtggttactccagttccttcagctcctcaggaattgaacactattgtttccctgacgccttcttcagacgccccacaagaatctggcaagaggaagaggggacggcccaaacgtatacaagacgttcctgtaatggttcctctgacctcgcaaggagatagcacatctgttattcagacacttccagggtccagtgtacatgaatctggtacgagaaggggacgtcccaaacgtttgcaggatagttcagatattgtcactccaattgactcaaaagatagtgagtcctctccccagccacctattgccgcacctgccgaaagtggtaagaggaagaggggacgtccaaagcgcattgatggttccgtgactccttcaagtcattctgttttttcaatagatgatgatgctgttgacacgatgaaacgtggacgacctaggaaaattgataccaaactgttacagtttccatctttattttcagatgatcctagacaaactgcagataatgtactcatgatgtttgacgccctgcgacgcagacttatgcagatggatgatgtgaaacaagctgcaaagcagcagcctaacttgaaagctgggagcatcatgaacaatgctgaacttcgtgtcaataaggacaagaggataggagaggttccaggtgttgaggttggtgatatgttctacttcagaattgagatgtgcttagtggggttgaatagtcagagcatggcagggatagattacatgtctgccaagttcggtaatgaggaggaccctgtagctattagtgttgtgtcagctggtgtatatgataacactggagatgatccagatgttctagtttatactggacatggcatgtcgggtaaggatgaccaaaaacttgagaggggtaatcttgcactagagaggagtttgcatagaggtaatccaatcagagtcattcgtagcgtaaaagacttgacttgtccaactggcaagatttacatatatgatggtctttacaagatcaaagaagcctgggtagagaaagggaaatctggtttcaacgtgtttaaacacaagttgcttagggaacctggccaacctgatggcattgcagtgtggaagaagactgaaaaatggagggaaaatccatcatctagagaccatgttatattacttgacatatcatatggtgtggaaaataaccctgtctgccttgtaaatgaggttgacgatgaaaagggccctagccgcttcacttatacaactaatttgacatatgggaattctctcagctcgatgagaaagatgcaaggttgcaaatgcataagtgtatgcctccctggtgataacaactgctcctgtacgcatcgaaatgctggtgaccttccttacagtgcttcaggcatacttgttagccgaatgcccgttttatacgagtgtggtgattcctgcacatgttcacaaaattgccggaaccgagttgtacagaaaggtacgcagatccgttttgaagtttttaagacaggagatcgtggttggggcctccgtagttgggatccaattcgagcaggcacatttatctgtgaatatgcaggtgaaatcattgacataaatagagtgaatggtgaagatgactacatatttgagacttctcctttagagcagaatttaagatggaactatgcaccggaattgctgggtgagcctagtctttctgactcaaatgaaacaccaaagcagctgcctatagtcatcagtgcaaaacgaaccggcaacatagctcgctttatgaaccacagctgctcacctaatgtgttttggcaaccagttctctatgatcatggtgatgagggatatccacatattgcattctttgcaattaagcatattcctccaatgacagagcttacctatgattatggccagaaccagcgtaatagtattcaaatgggaacccattctggttttcggaagtctaaaagttgcttatgttggtccccgaagtgtagaggttcctttggctaataaccagccctataaggaatatattggatcataatactccatttcaaagttacacctaagatatctgctggtcgacttttatattcagctcccaaaaatctgtcacaagtttgtgagagcaactgaattgtctttaccagcagaagcagcccgtcatggtggcctgtatgaagcagcaggggtctcctatgtcctaggtgttccatgcaccatcgaataaatccacccctcttcatgttagaatgggaaacggggatgtgttttgcacaaattatctgtcatgcagtcgtcgtattaagttttcttgaactagtttgtagtcatcctcagagaatgcatgatgtgcactttgtagtaatatatgcaggttgttatcccacctactatataaccatcaaaatttcagtgtttgtacaggacgccctatgtagtggcgctgcttgcaaatgttagttagtacactgatattccataattttactcctttccaaattaattcaacttataaaattattctaagtc

SEQ ID NO: 4988 - DNA, 771 bp, Zea mays
cctcgaggccggccgggatactccccccgtctccggcccacaaggccacaatccaagccgaagaaccctaggcggtggcggcgcatcctgcataccccaccgtagtggcagcgagccagcgacctcgagtagcagcagaggctccgcaggggcgaaaaggtgtgaagcttccttcggagatcccagtagcagaagcaacgcaggcatcggcttgcgacaggagaggacggagatgacgcagaagcagaccctgttcaaggggcagagcaagaagaagactatccctcccaaccgccacggcaaggcgcctcatgttcgtaaaggaaagagagccgtcaagcccaccaagttcacaaaggacatggacgccgagaaggaactcaccaagttcatcaaccagtgcaacgaaataaaagctgcgaatcttgctagcaaagagggcggtgacctcaacatagtgaaggcggatggcgaggaatctaaatcaaagaaataggaagccagaaactgaaaacgagtgtgtgaaacgtgatgcgtggtaaactgttaatgcgatgtattctgctgaagaaaattcagttccgtatggctgggtagatgaacatgtttagcgcaaagtgacggtgtaactgcaaccggggtaatggcttgcaagttttgttctgtgccatctctatttctccaattattatattgatgaagtttgtgtgcaaaaaaaaaaaaaaaaaaggcccctagggcccccctgcctcccatttaattaaaaataaa

SEQ ID NO: 4989 - DNA, 4108 bp, Zea mays
  misc_feature (285)..(285): n is a, c, g, or t
  misc_feature (518)..(518): n is a, c, g, or t
aatatgtatagtaattttttaagatctgcgaaggaaactttgtaataaaaaaggcgtactattttaggtgaagtaaaaattaatatacaccatattttaatatatgatatataaatgatatttttctgtgcgcgttctatacggagaaaggaatgtagaaaataaagtccggtaacattgtttatatagaggataaaatttagagaatattgctgaagtagaaaaaatatagaagacaaatgttttacatagaatatttatttagaggattaaatttagatactnctcatctcctccatgcatcagctcctatctacattttttttgttttgtgacagcagtagctccaacctttattatcttcccgcatacccacgcgcgttgttcaaaacaaaaatcccacaaaaatgaaaatcaaaagaaaatccattcacgacccacccaccacagaaatcagtttgctttgagtttaaaataaaaactttgctttgctttcttctgctgttgctgtgccgcgngtccggcgccggcaggcagtgtccccacaaccacaacacatacccgggcagaggtccccaccccagcatagataaaatgattatatcagggccatcgtccatatctcttctttgtattagtttttttataaaattccttatctatagatcttttatatcatcttttacatattagagattcatattaagctgtcttgagcggatggtgaatatgattgtgtaaaacattacataaattatactatttataagtgaagttttaaataaaggagaataaaagaaatccatattaagttgccttcgacatagatggtgaatatgattgtgtaaaatatcatgtaaactgtattatttataaagtaaagttttgaataaaagagaataaaagatagtatgagtaagctgtgccagatacctttataacctaatttcattttcttatatatttattgtatccttaaatattttatatatttttagttctaaaatataaagataaaaatgtgaaggtgtatatgtttaaacccccgccccccggccctccgccccgaacccttcgtcagtttcagtttggcacctccgaagcttccgtccgaatctctgctgcctccttcctcggccaggcttgcgggcgatggcggcggagcagaccgccgagcagttccggggccaggcgcggctgccccacttcgcgtccccgcggcgctacgacctgcgcctcacgcccgacctccccgcctgcgtcttcactggctcggtggcggtttccatcggcgtggccgcgcccacccgcttcctcgtactcaacgcagccgagctcgacgtcgcgaccgggggcgtcagcttcgcgcctcagggctccgaccaggtgctacaacctttggaggttaccaacgtgccagaagatgagatcctgattattcgcttcaatgaggtgctttctatcggggagggaactttgacgattgcattcaaggggactttgaatgataagatgcatggattctacagaagtgtgtatgagcttaatggagagaagaaaaacatggctgtaacacagtttgaaccagctgatgcaaggcgctgcttcccttgttgggatgagcctgctttcaaggctgttttcaaaattactctagaagttccttctgagacgattgctctgtcaaatatgccagtaattgaagagaaggtcaatggccctaccaaaatagtctacttccaagaatctccgataatgtctacatacttagtggctgttattgttggcaattttgactatgtggaagatttcaccacagatggtactagggtccgtgtttacacacaagtcggtaagagtgcgcaggggaggtttgctctagaggttgccttgaagacattggtcctgtttaaggagtattttgctgtgccataccccctccccaaaatggacatggttgctattccagattttgcagctggagccatggagaactatggcttggttacataccgtgaaacagcattgctatttgatgagatgcactctgcagctgccaataagcaacgggttgcagttgttgtagctcatgaattagctcatcaatggtttggaaatcttgtcacaatggaatggtggacacatctgtggcttaatgagggctttgcgacttgggtgtcttacttagctgcagatcagttctttcctgaatggaatgtttggactcagtttctagaggaatctacagtaggtttcaagttggatgctcttgcaggttcacatccaattgaggtggacataaatcatgttgatgaaatagatgagatatttgatgctataagctataggaaaggagcttctgtcattcggatgctgcaaaactatcttggggctgaggtctttcagaattctttggctgcatacatcaaaagatttgcgtattcaaatgcaaagactgaggacttatgggctgcccttgaagaggggtctggtgaaccagttagaacattaatgcattcatggaccaaacagcaaggttatcctgtcattactgtgaaactcaaggatggaaagttccaactggagcagacacaatttctttcaagtggatctacaggagttgggcaatgggttgttcccatcacactatgttgttgttcctactcgcgccaagcgaagttcctttttcatgggaaacaagaagattttgatttgtcagcgtccgggtttacggactgccaaaagaaagatggcttctggattaaacttaatgtcaaccagaccagcttctatagggtgagctatgatgaggaacttgcagcccgacttcgatatgcaattgaaaccaacaaactgggtgcagcagacagatatggtgtacttgatgatgcctatgccctctgtatggctggcaaacaaaagctagtctccttgctgcatttgatttctgtgtacaaggatgagactgagtatactgtgcttgcacacataatcacgacaagtctgcacattgccgagatgatggctattgctgctccagaggagttggttcatctgaagaagttcctaattgatttcctggagccatttgcgctgaaacttggctgggatgctaagagtgacgagggccatctgaacgctttgttaagaggtacactcttaaccgctctggcagaacttggccatgaggctaccataaatgaagctgttcgtcgatttaatgtctttctggaagacagagagacaccactccttcctcccgatgttcgaaaggcagcatatattgctttgatgcagacagtgagcaaatcaaacaaaactggctatgaatcactactgagggtatatagggaaaccgatctaagccaggagaaagttcgtgtgttaggttctttggcatcatcccctgaccatgatgttgtccgtgaagtattgaatttcatattgtcacctgaggtgaggaatcaggacgcaatatttttgctaagaggggtgagttcaggggcacacgaggtagcatggcaatggctgaaggaaaactgggattacatattgggagcctactctggaactctgctcacctatttcgtcaacataactgtctcgccactggccaccgatgaacatggtgacgaggcggaggagtttttcaagagcagaaccaaggcgaacatcgcgaggactgtgaggcagagcatcgagagggtgaggatcaatgcccaatgggtcaagaacatcaaggccgaggctgacctcggcaatgttctcaagaagctggcttacaagcactgatcagagacggtccactttcatttctgtgttagtcctagtaccgagatgtaactttgttctctggaataagtggattaataaagggcactttcgtttgtgtgtcgtcctgagctgccttgtccgtagattcttacaaactgttgtgcgaaagctatcatgatagatatgcgtcgaattgattgattctatatcctgataattgattgcgtatcgcccatgtcgcacaggagaacgataaatttgttccaataattgactgactgcgtgttggctttcaaaaaaaaaaaaagggaagaaaaggaggaacggaaaaaaa

SEQ ID NO: 4990 - DNA, 2474 bp, Zea mays
  misc_feature (2295)..(2296): n is a, c, g, or t
cgggccgcctccccgccggtgcctgtcccgaaagagaagtgcgcccgggccccgacgggagggacccctaatctgtcacctcccccaccgcacccccgtagcctcttcaatctcgccggccacctcacgtcctcacctcgcgtggcctcccgttctgacttcggagtccctcggtctcaacgactagttgagagctcgcggctccgttcgggcgaggggaggaggttcatgaggctgctgtaggctccgttgcagccgccgcgggcgggagtccgtgattttggacgccccaccgcggcaagatccggaagcgcgttggctgttgtgccgtgagtttcagtttcggtggtcgattgcttcagcctgctgagaagtaggaggggcggccatggcggggtcgaggttcgggtcgttcaagtcggagaagggcgactccgcctccgcagcggcggcagcgggtggagcggcgcagaggagggacccgtacgaggtgctcggggtgggccgcaccgccaccgaccaggagatcaagagtgcgttccgacgcatggcgctcaagtaccatccggacaagaatggcgatgaccctgttgcatcagacaggttccaggaagtcacattctcctataacatcctgtcagatcccgataagaggcggcagtacgatacatcaggatttgatgcaatcgaatctgatagtcaggaactggagctggacttgtcgagtctcaacactgtaaacacggtgtttgcagctctttttagtaagcttggtgtgccaattaaaacaactgtttcagctacagttttagaggaggcattgaatggttcggttatggtttctcaactccagctaggaaactcagtgcagagaaaggtggaaaagcaatcggcccatttctattctgtggatataactgaaaaacaagctaaaatggggctagtttgtcgtgttcactcaaacgataaaagcaaattcaagttgctatattttgagcttgaagaaaatggcgggcttagtcttgcactacaggaagacagtgtgaaggttgggaaagttactgctgcagggatgtatttccttggttttcctgtgtaccgttttgaacaaaataacctggcagctgctgcaaaagattctgatggtgcattctttaaaagattggatagctttcagccatgtgacatacatgaactgaaacctggaacacacttctttgctgtctacggtgacaacttcttcaagagcgctagttatactatagaggttgtatgtggtgaatcttttcctgccgaaaaggagatgctacgaaatgtggaggccaagatactcacaaaacgagctgaactttccaaatttgagtcagagtatagggaggttttggcgaagttcactgaaatgaccagcaaatacacacaagaaatgcaagcgattgatggccttctgaaggaaaggaatgagatccatgcttcctataccaacaatccacctctaaaacggagttccagcaggaataaagccaagtcgccttcgaaagtggccaaaactggtacagaaaaacatcatcagaaggaaaagaaggtgaaggatcactgcatggagggatgtggaagtgacagcgataactcaagtgaaaagaaatcaaaagagcggttcccaaggaagaaatggctgaaccttccattcaaacttgacaggagaaagacgtgctgagcaatgtattatatgttccgttgctattctatcctgttatgcataatcctgagctgaactcacatttcttctctttctcatgcttttataggaagtccctctcggcccaacactagattgatatacagagaatttccactgtggcctcccgaaccaagccctctcccactgctaccaccttccttcgttgtacccggattatttcgtgtaaagatcacatgtgatcctaagaattaaaacgtgagtcgttttagcatatattgtgaagcacgtgctggcaagttgccgttcttggcattgggtcaaattggggtgccctgcttccgattccgtgctgcaccgtgcctatgtagcatgtaaagttgtatatgctgcgaatcgtagtacagctatatatttgtgtgtcctgaatcttgagtgtctttttactgccttctgtaaatgctccccaactgatgtaaatacaaaattccatgttcctcgcactaggatccgtgtgccaaattaaaaaaatctaaaaaaaaaaaaaaaaaataaaaaaaaaaaaaaaaaaaaaaaaaaaaaaaaaaaaaaaaaaaaanngggccgtgtggaaaaaatgggaaaagtttttcctgaaaaaaaaaaaaaaaaaagggccccttggtccgcaccttttttctctttttagtagggttaaatgccccctttgggcccccgtgggaaaaatttgggcatggttttcccccaaaaaaaaaaaaaaaacggcccccccgacccc

SEQ ID NO: 4991 - DNA, 1525 bp, Zea mays
actcctaagggcgagtgggtctctcgcgcccggccgcgacaaccctttcccttctctgcttgcttgctgctgcagtgctgcctccccctcgcccagcagcagggagcagccatgccaggggaccacggctccaagggcgacatctccttcgccggacgcttcacggccagcgccatcgcagcatgcttcgcagagatatgtaccatcccgctcgacacggccaaggtcaggctccagctgcagaagaacgtcgtcgccgccgccgcctccggggacgccgcgccagcgcttcccaagtaccgcggcctgctcggaactgccgccaccatcgctagggaggaaggggccgcagcgctctggaagggcatcgtcccgggcctccaccgacagtgcatctacggggggctccgcattggcctctacgagcctgtcaaatccttctacgtcggcaaagaccacgttggggatgtccctttgtccaagaagatagccgccggcttcacaactggtgccatcgctatcagcatcgccaaccctactgaccttgtcaaggtcaggctccaggccgagggcaagcttgcgcctggtgtgccacgccgctacactggcgcaatggatgcttattccaagattgctagacaggaaggggttgccgctctgtggactggccttggaccaaatgtagcgcggaatgctatcatcaatgctgctgagttggccagttatgatcaagtcaagcagtcaattttgaaactccctgggttcaaagatgatgtggtcacccacctttttgctggtcttggtgctggcttctttgctgtttgtgttggttccccagttgatgtggttaagtcgagaatgatgggtgactcagcctacaaaagcactctcgattgttttgtgaagacgctaaagaatgatggccctttggcattttacaaaggcttcctgccaaactttgcaagactgggatcttggaatgtgattatgttcttgacattggagcaggttcaaaagctgtttgtgaggaaagcgacaagctgaagatagagtttttgcagtcaggtggcgtacaattgacgcacagggtttttcttctatagacaaaaggggagaaatgacacctcccccctcgagaattggggaacaaggacagatctgacacctcaattgcgagaaataaaaataacagccgacagttgcatgatccctgaacgaataaattcagaactagaaaacagatgtcagtaaacaacatgtggtgaatgttggaacttgaactgctctagttcagtgggcatctgttgttgcatgcttgggatggatttaatgtttcgttttttttcttccttgtactgaagtgctctgatcggtaacgatcactgtgtgtgaagtgcttgattgttatgtggtatcatgagaatgaataaacataataatggagctgtttttttattttttactgttttttttttttttgataaacaggtcgtccaaaggatgcactctttatagcaacatatac

SEQ ID NO: 4992 - DNA, 6000 bp, Zea mays
gatgagaatgactatgtgtaagtcagaattggatatgcatgtgacgcatgcaaggcagagacaggcctaggtagagattaccgtgagaccgaccctttgtgccgtggaggaaatatatactatccaagtcggcacagatgatgtgcttgagtgtcagcgcgtgcacgtctcaccacggtttcaacctcggcttacagatgatgtacacacgcacgcagacgcagccggtagtagggtcggcctgtgtgtctacagggaccggccggtctcgcagcgttcccttcattcctcttcgtcccctgcagcgacgtcccggtcgacacaacgccaccaacacgagctggttttccgtcgccggatcatcggatatctctgtgtggttttgtacggggaagggacgcgtcgaagtcgaagtcatcaagggcaagggcgccgccgagatccaagaccccgggaacttgatccaaggcagccaggcgcaggttccacctcgaccgtcactgccctgcgccgcgccatcagcgccgtggaggtggatcggatcggggacggagatgattatcaccatttcgcaccacggtagttagctcgtccttacgatcgagctcgagagttcagactgtgatctccatggatgaaggtactctccacgactccacgtatggcgtgtccgcagctcgggtaagcaaccacggaggacgacgacgcacctgctatgcagccgtagctatcttagtacccgatcccctgacgatccgatccgatccatcatccacacgcgtgttcatccgccacgaccactcactcgcgccgattgcagttccgcagagctattggagcgtggatttgacgccgcccgtttccatcacgcgcgacgacgcccaaccacggccctgcctgctttgacctcttccaggccacctctgtaacaaaaaaaaactctccaaactcgcccagttcatctccccaacgcgagatcagatccaaccattcgaacggattcgtgcgccgtcgagcatctccaaagatttcgtggacgaaaccagttgaaggaggtagctcgtgacgcccggtacactttcttcccgcaacaccatcagcagcaagagctcgggtcactctccatcgatcatctccagagatcggatcggagcgtggcaacgcaaatgcagctacgacggcgggcctccccgtggacgggcacgccgcagggcggcggagctccgacgagccggcgcagaaggtggccgcgagtcacacaccaccaaggacggggtgctgctccgggcgtgtgtcagttgcctcgcgttccggccggccgtagcccgccgaaacgacgtcggttcggcgagacccggggctccccgccttcctctgctagcctgctacgcggccgtgccgagaaaccgcattgttcgccgccgcgcccggtgtcgccggccggaaatcccgtccaaactcacacaaacgcgccgtccggaccagtccgggttcccgagccaatatctccgcgtacactgaatggaatccatgggctgtacgctcgttcggaagctatgttccgttactacgaggctgcagagtttgagacagatatgttcatcaggcgaagagatattcgatcgcaaatcgggaggagaagcacactctgagccccagcatcgcgaccccggcggccggctgcgcctgcggggcaggaatccgcggcaccgcgtgggcgcgatctggcggccgttggatgtggatggaacggacgggccaggttcaacgtgggggcgttgatgggagcgatccgaggcgaggccgtgtggaccaatcagcgcgctgcgtgggactctgctcgtcttcgtgccgtcgccactatttaagcaccgcttcgtctactccggcctactcacccagcaccgcagagctctcatcctctctctctctctctttctcgcgctcgctttgcttcctcgtcgaggtccaagttcctgcattgatggcgaccgaggtggctgagactcccgcgccgttggcggaggcggtccccgagacccccgcggaggcaccggcggcgcccgccgccgaggcgaagcctaccaaggccaagaaggcctctgcgcccaagaagcgtgccaacccgacccacccgccgtacgccgaggtaattgcagcctttgtgccacgttagcttgcacccatgtcgtgtatgtcgcgtctggatctgacggaattgtggacggtttgctggtgcgcagatgatctcggaggctgtcacgtcgctcaaggagcggacggggtccagccagtacgcgatcgccaagttcgtcgaggacaagcacaaggacaagctcccgcccaacttccgcaagctcctgctcggccagctcaagaagctcgtcgccggcggcaagctcaccaaggtgaagaactcctacaagctgcccgcacgcgccccggccgccgccaagccgaagcccaagtccaagaccgctgtgaagaagcccaaggccggtgccaagaagcccaaggccgccaccaagcccaagccgaagcccaaggccaagtcccccgccaaggcgaagcccgccgcaaagcccaaggcagccgcgaagcccgccgctaagccgaaacccgcagcggccaagcccaaggcggccgccaagccgaaggccaagccagctgccaaggctaagccgaaggctgccgcggccaagccgaagccagctgccaagaaggccggccgccccgccaaggccgccaagacgtcagccaaggacacgcccgggaagaaagcggcgcccgccaagaagcccgccgctgcggccaagaaggcccctgccaagaaggccgccccagccaagaaggctgcgaccccgtcgcggaaggtgccgtcccgtaaggcgaagaagtagagcggtggtcttggcaggaatctagggtttcgtgctccttcgattttagatgtttactcgtttttgctctagttgtgggtggtgcgcggggtgggttactaggttgtaaatttgatgtcggaggctggggtacacatgggcattctgtaccagcggtggaaggcgccggcgacgatgacgaaccagtgtgtgttattattattagaagacaacgttgtatttctgtagctgaattgttgagttgcggatatcattgtgctgctaaggttaatgtgacgataaagttaatgtcaagagttaccttccttcgcgtgtatgtactctgattattcaggctgtttttggctgggattaatctggtcttatctgaattccctatctgaaatagagaattgttcggtgtgcattttgtgaccaacctgctcatgcaaacatgttgctttcgttgtacgtcacgtgtaaggcattctacgtggctttatgagctgtaataacggtcttatattattgttctcgggattttcgtatcttttcggatgagggtatatgcggtttgatgggctgagctgctgtggttgtttgaaaccctagcgggcctcgcgttgcatatatcttgacggcccgcggcaggctaggtctgctgggcgtttcggagccgtaacagccctaaccctaggtagctgttgatcctcttgttgctgtgaaactttcttcttttgccttgccctgccctctactgcttttccacctttgtttggtcgttcttgcatctcgtcgggttttgctggagtgagaacgagttcactcgcctttccgtgcatcgcgtcgttctggactggaggagtcggggtggacatcttcctcaacctcgtgatgtgataccggtaactggactcaaatctgctttgctgtgtcctgtctcgaatgggcacacacacgaatccacgggaccagctggcgaaacaagtttactcgacccgatccctatacgatacggcaggtggtgctttccgacctgcatcctcttacccttctgtggaatgtggtccgacttttgtgacattgtcagtccactgacgtccggtgcgttgcacgggaagcacgagctcgcctgctcgtgcgcgcggaaagctctccgtgagaccgtgacggcatctacgcctcgccatttagtagcaaactcggagctgggcgagttggcgctggtgaaccgcgaccgggcacctgacgaacggacggaacggacgcacgcggctggagcaggaacgaaacctatggttttctctactggacttcagtttgggatgggcctagcccagctgtgtgtgacgatacctggggggccctggctggtccccggttaagaatcgttagcccacgagttgctctcttgtcggtttggccggcccaacccagcgcgagaccaagcgactggcgccgctcgctgtgagtctgtgacacgactacacgagatacgagtggcggactggatgtcaaattgaaatcttgtcggtttggatttttatgcgccaaatggagtaacaagacatatgtttagagtgtatctattttatgctttgataacatcgtgaaaaaagatttgatcaaacatatggtcgaggataaaaaaaactaggcgtcaaaactttgatatactctgcgcggtagctcaagcttcaccatcaagctccttcaatttttgtgcatagtacaccgacaagaacggcttgctttaaaagaagctaaagttagcattagattgtaccataagacatgtatgatgaatggaaaacaagtagtgtaagctttgctttggtgcaaagagtcacctttttttcgtaacagtccaaggagatgagccgtcatcaaaggctaattgccactcctcacctgtgttacggtatgcggctatgcgaatcgtcgatagagcctggaaacgtatacaaagcaacgttattcagtcaggttgcaacgtcgtcatctcgacgtacgtaatgtttataaaacatcgcacttcagttgccgattgaatgaagtagtactaatttctctctcgtatcaccgtaccctcaaagaatctcatagcaggtgtcaaagaatctcatggcgttgagtcgggtctacgagtttcaacgtcgatggtgttcatgcttatgtgcactacgcacgctttagatgggatcagaagaggtgcagtggcacgactgatgatttattggcatcggctacgttgttaagcagtcgtagagttgccgtgcccccgtttccgcacctgctactgttcgatgtgagagtaaattaaaaagaagctgtcctgcaggcctgcagctgcagtccacactgtgccgagcgtaggcactcgttagcctgtgcgctcaagtagtttaatctatatcaacttctacagttctactgattgtataatattttgtatagataaattatcgttatagtagtccgaacagtttggaattaatcttctaatttaacgacgacgttctgacctgtgaaagaaaaggctagttttgctcgtgctgaaacatcttggtacctactactatactgtggcgtgctgcgcgtctaccgaacacgtcggtgggccaaacagaaatgggggtgcacgtccggaagcagagcaccgatgaattgggggtgctaccgctgcggcgaagggttacggttgactggcctaactgccggtgccagctacaagcatccgatgttgtgttgctcacagtacagtggccaacggggaccggatcggccactcccactccctacccgctgaccgagcggtcgcgactccccgtcttcctcgcggcaccgcggggctccagcatccagctttgctgggggcctgtggctgtcatggccaaggcgctgtggtgagcagcagccggcagggcatggaagacgtgcctctgccagcacagtgaagacggacactttactgctaccgtgtctgcatgtgcgtgacattttgaacaacctaacctaacctaaccaagtacacagcctacgcaagacccaacgaagtaggtaggtaccactgaccgccacttacacttgggcccgaacggtgagcacggtacactcttgg

SEQ ID NO: 4993 - DNA, 5335 bp, Zea mays
ctaaaattagggttttattgttgagcagaacattttgttgttggtgccctagattatggtctggttccgcgttcatcccaacaaataccaaacaaaccctttgattctcgcatcaagatttaaggaatcctattttgcagtactaacataaattgagggggcgcccttgggttgcttgtgttccgacaaagtagcatatgaggcatttattaacatacccccccacgttacatttcctcgcctgtccagacgttgagccagccaacaaatagtaacaataaacaatagtaatccttacatcacaccagtgacttacacgggcagccgattccatcggctgcaaaatttatcatgcatgatatggtatcgcttcgaatgtctttttgcagtgcaacagcacactctattttcttctatgcaacaaaatgaaccaaaaacatacacaaccagcaccatgccacaatcaccaaaacaaaccagaatagacagacatggagcgaaaatatgtttcacatgtgtctgatgccaaggatgctctgagctgtgtaccagcgtggagcaggctcagtgaagtcagcaccaccactctctagcctgacgaggcatggccacttgttgcagagggcttcgcaacgtagatctgcttcatcctaccagtgcctgaactcctgtcggaaccagaaccttgattcctaccctggtaccctgatcgtcgctgccactcgttaccagtaccagccttctgagtcgcacgggcacggcgatcctgattgttaaccagatgctggtattgcgggtctgatgatgatgacgaggactgatgggtcttggaaggtatgctggtgacctggggggcgttcgtgctgccagccgcccctgctgcaattccagggttgactttggatggggtcaccctaaccatggctttggcactggttgggacttcattgctgatcaagcccgcctggccaaacgaaggctgaacagtttgggagcttgagctggttgaggctggctgttcgacaagacctaactcatccctgtactgagaaacggctgcatttgggaaggttttgttgccgtctgatggcccagcagaagcagaggactcctgaaatcggttatttgtaccagacttgtctattggcacgttatgaacaaactgttgtgtggctgtaccctctactggatgctgcttaagtgcaactgataatggaactgagtgtagaggaggtacaggcatatgtggccagcacgtttgcatctgtatgtctgtagatgtctggaaaggagcaatgtcgaacatggtcaatggagacgggattggcatgatagaagttgggcgtagatgtggaactggagcaggaacactaggagcgtttacttgaccagacaccatattttggctgtttggatcactctggcttacaccaacaataggtggcccttgactttgcttccagtcaggctgcttgtcaccagggatataagtggctcccataaaaccaagtcccatctgaccaaattgacctactggggcgaagtggttatagaccaccatatgtgggggggcttgcacgcctgggattcctcccggagtgatgaaaggaccagcgtacccagttggagggcggtagaaagagtctaccccagaatgacactgtggccaagctcccaatggtgctgaaggcaatgcattgcttctttgagggtgctgaccttgagaaccagcagattcgtcacttgggccaaatgcaaaaatgtgccctcctaacatcgagttcatatcaaagcaggaaaagtgggatggctgtgcaccatgaaactgagaaagcattggccctgatgcttgtggactggctataggaggccacaaggacatggatggagtatcaaccgataagtctgcaggaagagcaactgcgagtggctcttctgtggatgattgaccagcttgacctgttcttgcccctcctgatgttaacccactgagatccttgcttgtaaagctcttgtctggagccgatgcagtagttgcatcagctggagatccctcatcagtgctaatagctgccacagccacagcagaagcagctgcttcagcctctgcttccgcatcctcggtactcggacataattccttggaatttgccttatcaggaccactgttatcgctaggcaagcctcgatcgatcttcatatcaggcctagatgaacctggagctccaagaccacttgaaacagttcggctgactgggggtagcatggttggtgacgttactgccccaaattgaatcttctctccagccagaagggagttaataggactagcagatgaaggcaacaccttttctgtgattactgtgggagacaaagcattgttggactccaacgaaaagccaggcccagcctgctgttcaaatttagctggtcccatagcttcttcaagttgagtttgagttaatggcatgacctgttggtttatttgtgaattatccccaggaaacccatgttaaatggagtactaatagatggccctttattgtcgccatcagataagccactcacaagctttgcaggactcgaggtgaccaagtcagaggatgcctggatctggataggctgattggcaaagcagtttgtatgagtttctgcattggttgagggtggccctatgaggttcatggaggctgtatcacccatcaatggaattgaagattcagcatagtcaacaattcttccttctactgtgatggcggaaccagaagaaactttctttgtaacttctccactagaaggagctgctcgcttattcacactaggaccaactgagctttgtagggaaatactatgctgtttgcggggagcctttgccatccttattttggatctgttttctttctccctctgctctctcctgacactcatgatctgccttttggatcttacttcaatgaagccatctgcatcaacagggacctcaatgccttgctgcttcacaacacggacagctccagcttgcaatgaggtagtatctccatcaggaacagcacccgttctagacttcttgttcccaccatgagatctctcataagggacattgtgtgtacctcggccccggccacgctgatcacttgctccatttatcctagatgccttgctcatatcaagttcccttctattagtatttctcgctggaatatctcttgttccattggagcttgttatctcatcttgttcaccatggcaaaatgattcagaagtttcattttgattcttctcgatgttttcccgaactctaaactcagttcgtcttacattcctacgagcccttctctggaatcctcctttggaatccttatgagaaggctcaacaattgagccagtagatctcatgttaatgtctttaacagcatatccatatctcctcccccttctatcagagacaacaccaagagcctttggatcacccatggctctcccctccaaaccatattgagaagattctacattgttggacgtaggtctgtaattcctcttcaaagagagaccttgattcctcccacttggagttgtaccctcagcaaactctctgtccacttgactactaaatccgtccacaccagccatctgattgtttgcaggagcattgagatactgggaatttgaattgtccatgccaaggggaaccttggttgtaggtgctgctgatttgttgataaaggtggatgagcttgcctgagctgggatgttctggtttgtacctccatccattagctcaggtagaacactggacacattctgattcaatgtatgttgagctgatatggaagaatgtgcagggcgggtggcctgagaaggcagcgatcgaacactcggagcgataggacgtacatacctcaactggccaaattgatacaaaggggttgttgaagggtgcatatgaggcagggatgggttaaactgattgtggagatggattggcatctgtatggaaccaatttgaatggctggaaccggagttggtattagaggaggacctgtaaacaaaccaaactggaggctgacaggtacttcattctgcccaactactgttgaagctgacgaaaaaataggacccacagaagatgcctgaggtaactgggaacttgaagcaggtgtccttgagctattggatggctccccattactgtcttctgtcaggccatttacaccatcaagagtcaatgcctgcagtgctttctctgcttcagtaacaggatcagaatggacaactgaaccactgacattctcttgctctgcaactcctgagtttagatgtactccaactgtcctttccgtgctcctcacagaagctaattcaagttgactattcggtggaatttcaacctgcacgccctcatcaaacccaagtataactggttccagttctacgggtgtatcctgcccctctaagaactcatcatccaagtctatgttctcctcgtccccttctttcatttcatcttcctggtagctatcattgtcttcatcatattcatcctgttttcgcctatcatcattgtttacacttgaccattcatcctcctccaagtggggcactcctgaggcagcaattctgcttgtattgtctgcatctacagtcagagctgcatgatggttgtcagagagcgccgtatgttcaccatcagcagaagtcggtaacacaggagaatcaccagatacgtccatctcatcatgtgaaacatgtggaggtgagctaggagggcttgaaacagaaagagaagattgtgaacccaatacagggctttttctgtccacaatttgttgctcattgacagaaatgtggtcagatcgtatcccatgctggcgagatgtctcttggtatacacttccgtactgaccctgcataatctgcacatcatctctaccagaacactctctgttcccaccatccacaaaagatgaattgaaacgttgtgctgaagcaccaattgaacttctgtgcacagaggtcacaattgggggtgggggaacacgtggttgcctcatagagtagcgtggtctggtaaaagaagacaattcattaacatcaggactctgaaacatcctatctccttgttgagcattgaggcttccatgagaactactaggcagccaagctgtatctccaaacctgtcgctgttaaaaaactcattatcaaattcagattgtttgctgaaacggtcaatctccctaggcgcatcccatcgtggaaccttttcatgatggaaatcttcaagtgcccatgaagaatcagttgttcggcctgttgaagattgcctaaccgaaaca

SEQ ID NO: 4994 - DNA, 2466 bp, Zea mays
tactgtacatgtgtcacccttgttttcttcccattacaatattgtgattagttactgcagaaggaatacagtagcagttatgtcaggactatgaattttgactcctttatagcaatatgggcaaaatgcaaaaatagtggttatgcacgctgactgctctgtttaactattcctattacctttttttactaaagtagataatacttatatttgtttaacattactgaaattatcttgtgtttcttatactttaggtgttgctactgcttttgctgctagagatgttcttggtaacattcttagtgggttctccttgcaattttctaagccattctcagttaacgactacataaaggtgccctcatatttttttggtgttttttatttgacacttgctgaaacgatggactagtaagttgtaaatttcattcatttcacttgcggacagtgtagaactatggataaaatactcaattcttgtttcgttatagatgttggtaacaataacaagatgatttgtaccgtgactcgcaagtactgtgagattctcaagcaattacttgtgtgatagtggagtaaaaagatgtgttgtaatttgtaaaggatgagaaaagaagcattgtgtgaaagggcctctagctgagtcggttaggtgatctgaatagcactctttaggtcctgggttcgcctccccttgggcctgaatttcaggccgaggttaagaaaagtcactagctggttcctttggtcggcatgggtgaactgacctatggtggacgccccggggggtatatggggttggttgtgtgggttgagcgtcaaagcacgggtcaaggcccaaaccatagtgggtggcatccccatgtatgaggggaccaactttcgtggcttttctcggacgggctccggtggagctcttagtgaaataccgtgggggtggtctttcccccaccagtcgagtttttttagaaagggaggaatgttactaatcactagaaggatatcctgatttcaggacaaaacactgctcattgctagcatgtgctcgtcttaaacagatgtactttgcttggaggattatgtaaactgcaattcagttcttattgtgataaagcacagtagtaagcatccaaactgaaaattcaaaaggatgtctcacctaatggatgcccactgatggttattaagtggttttataagaagagaacatagatgtggggaactgttcaaatagctatgagtatacaggatgccatatgcttttcataaattgctagtttggttaatgcttctcatgtatttatgctttgagtacatgttagtctatgtgcacgagaaatttcaagaaacaccatccttccctcttgtgtttgcaaacaataataaatggtcaatttggactggtgatacttatcttacatccctttttagattcttactatgttctatagttgtagtcccgcgccattctcagttaacgactacataaaggcggggtcaatagaaggcaaggtggttgaaataggactcacttctacttcattgatcaatccagaaaagctccctgtcatagtacccaactctttgttctccagtcagatgatagttaacagatcacgagctaattggcgagctagtgtgacaaagattcctattcgaattgaggatattgagaaggttccttctgcatcagaggagataaagactatgttaaggtctaatcaaaatgtgtcctttgatagtgatgttccttactgctatctctcgagattggaaagttcatatggagagctcaccattggatgcaacctaaaaaacatgagaaaagatgagtggctatctgcccaacaagaaattcttttgggagctgctaggattatcaaatcacatggcattgaactgggaagcaccatgcagtgctgttaattcacgcttccggcacttttaagtagggtaaataccgttagcctgcagaagtgcagaacttcatacagacgctacctagccgttttgttcttcaacgttttatgtcttcagaccatggacacccactaccaatactattctgttactgccgttttctttggaactaaggtctagtttccttttgtggtcgtcccttttggttggtgcttggatccgtttctgggagcttctttgtctatgtatactggtgaacgtttgcgccgcgcccacgcctgccctgtggatgagccctgagcgttttattggtcaattctgtgaaatattgggttttatcctcgaaattctagtgttttacgtagtactcgattaactagactaataggtgaccatcttgaagcaattcgtgtttgacactgaacattcctgaggacttggacttgcatgccccaggatagattccaccgctgttttaccatgctgaacgtaagagtactgacaggctgccatgatcagcatgtttctacaaaaaaaaaaaaaaaa

SEQ ID NO: 4995 - DNA, 6126 bp, Zea mays
  misc_feature (4815)..(4815): n is a, c, g, or t
  misc_feature (5886)..(5886): n is a, c, g, or t
ggctaacctccttttttctctctctatctttctctccatctgtggacttctccggttttgtttgacgagatgcctgcgctcgccgtcgacgccgcgacacccgtggcgcacgccttcgcgtcctgcgacgcggcgcgcttccccgccccgcccgtggtgggccccgccgccgcggccgaggccgccccctggtcggccgacctctccgcggcgctctacaacgtggacggctggggcgcgccctacttcttcgtcaacgacgacggcgacgtggccgtgcgcccgcacggcgccgcgactctcccgggccaggagatcgacctggccaaggtcgtggccaaggccgcgggcccgcgcgccggaggcgggctcggcctgccgctgccgctgctcgtgcgcttccccgacgtcctgcgccaccgcgtcgagacgctcaacgccgccttcggctacgccgtccgctccaccggctacggctcaaggtaccagggcgtgtacccggtctggggcccccggggccggcccggccgcggggccattgtggagttcggcgcgccctttgggttcggcctcgaggccggctccaagcccgagctgctgctcgccatgagctgcctcgccgcgcgcggcggcctggacgccctgctcatctgcaacgggtacaaggacgacggctacgtctcgctcgcgctcatggcgcgctccatgggcctcaacaccgtcatcgtgctcgagcaggaggaggagctcgacattgtcgtcgaggccagccgccgcctcggcgtgcgccccgtcgtcggcatgcgcgccaagctgcgcaccaagcacgccggccacttcggctccacgtccggggagaagggcaagttcggcctcagcgccgcgcagatactgtccgtggtcaccaagctcaaggccatcggtatgctcgactgcctccagctgctgcacttccacatcggctcccagatcccgaccaccgccctgctctccgacggcgtcggcgaggccgcgcagatctactgcgagctcgcccgcctcggcgcggacatgcgcgtcatcgacgtcggcggcggcctcggcattgactacgacgggacccactcggcgcagaccgacatgtcggtggcgtacagcctggaggagtacgcgggcgccgtggtggccgccgtgggccgcgtgtgtgaccgcaagggggtgcagcaccccatcatctgcagcgagagcggccgcgcgctggtgtcgcaccactcggtcctggtgttcgaggccttctcggctacggcgccgggacgcctggacgcggccacggcctacctcctcgacgagctcacggacgactgccgcgccgactaccgcaacgtgatggccgccgccgtgcgcggcgactacgacacgtgcggcctgtacgccgaccagctgaagcggcggtccgcggagcagttcaaggagggggtccttggcctggagcacctcgccgcggtggacgccttctgcgagctcgtcgcccgcggcatgggcgcgcccgagccgccgcgcacctaccacatcaacctgtccgtgttcacctccctgccggacatgtgggccatcgggcagcagttccccatcatcccgatccagcggctgcaggagcggcccgccgtcgacggcgtgctctcggacctcacctgcgacagcgacggcaaggtgagcgagttcatcggcgggaggcacagcctgccgctgcacgagctgcccacccacgccactcgcggctactacctgggcatgttcctcgggggcgcctaccaggaggccctcggcgggctgcacaaccttttcggcgggcccagcgtggtgcgcgtgtcccagtgcgacgggccccactgcttcgccgtgacgcgcgccgccgcgggcccgtcctgcgccgacgtgctccgcgcgatgcagcacgagcccgaggtgatgtacgaggtgctgaagcagaggaccgacggcgccacggccgccgccctcgcccgggccttcggcgcaatgccgtacctggtgttcgaccccgaggccgccgtgatgtccggcggcgagagcagcgactcggagcggtcggccgccggcgccgccgaggaggaagacgatgaggagtgggagttcatgcgcgggctcaccgtctgatgacgtgcccgcccgcccgccccgggtgaaacaaggcgagtccgtcgccaggaagttgtcagtggccggccggcgttggtttacataataacccccaccgcccggtgttgtatcgtgtcgtggtcgtagtcgtcgggtgtctcgtcgtcgccggagttgtttggcgccacctttttattccgaacgcgtcagtgtccactgttcgcctttccttttttttctctctctttcatgggaataatctgaaggaaactaatagcaagtttctctttaactggaaatttcgttttttcaagaattcattctgtctgttgctgtgtcggttccgcgcccccgttgcgtggtgcgctgccaccggagaacaccttcctctcgtctcgacgtcgtcgctttctcttttcttctccatcgtcgcgtcgtgggcagggggcaggtgtcacggccccgagcgccggaatctctctggataaaccccgagatattcggacgtcacgcgggtgggccgcggcggatttgaaacgcagctctgggacgctacctgacgcgcgtgtcagcgtcatcggagcggtaggtgtggggacgctggcgggctgggctttgcttccttccttgctgtgcgtgctcgactgcgtctgcctttgccgcatgtgttgcgagatgacgaggacgaaaaggtcttccagaatttatgagcagtttttggatttggtacagatgctgtgagctcgagctggagcaccgagaccggggctgcctgcgacgcggtaggtgagcgccgcccgggagtcggttatactacgactttcgccgcatacattcagccgccggccgccgcatacggcatggattagattattagataaagatcggatgagtaataagcagtgcaaagttcatgaacctgaaatatgcatgcatacacctgctggcgatctcggccgttgacggagcatgcatgtggtgtgtccccgttccggatggctcgcacagatctactgtctactactagctcccagagcagagcaggcagagatggttggcggttggcacaggtagagaggcagccacgcagtgcagagccgtggtagcgatgcgcgaggcggatggacaggatagggaggggatagcgtaggggccaagtgaccactcgtcggctctggcctttcggcgcccatctcctcctcatctcatctccctccacggtccacttgtttcgttcgctgtgtgacagtagtgtgagagattccagatccaacacctgccgaccccgtcgtgatcctgtccagcggctccagagacagagaggcacgaacacatgccaagctcccagctcctcccctcccccctcacctcacctcaggccctcactcccccaggtactcaatgctctttctctctttcagccgccgctgctgcgttgcgtcgtgtgggagctgagctagtggcactgggtgctctcgaccgcactaggcagaccagacgttgcgtcgtgccccatattcgccgtcgccgtgcctttcagcatctatctgggagtgaatgacttgggctgggtgacggatagctgaccatctcagctctctcgaagaacaagatcgtaggagaacctcctagtcctttgcccctgtcgacactttatatgctggtgtggtgtccatcctgtcgctgctgggggtgccaattgccatgcccattgtttgttcggtcccgttcaccggggatcggatcggatcgtctgtccagcagcactaccagttcggttcagatgcaatggaatggaatggaatgcaccaccgcgcgttgacgctggtcgaataaggaggctaatgctgcctcgtctaattcagcggttacggcagaaggtaccagttgccaaaggtcggtagaataagtacccaccatctggatccacccctccaaacttcagtgctcttataagagacctaaaacactttatcttcgtctacactctagagctctcaacgatttcaaacactttatatcaattttaagctataaatccaacatgagatgggctaactttagactatttatgtaaagctttagctgtatagtttagagctaaaatgtagagggggaaaacataaacaagctagccttaaaaattaaacttgaacgattattgaatctgggagatgtgtatatctcgattccaatagaagaaaaggatcagaaaaaaaatgcaccgactagacctggttaaagtgatctcgtgttcaaattaaaacaagtacgtgtatatttctagcagtacaagtgctcgtgtaaggctgcttgccaccaactctactaccatcgtgttgcagagatggtggttcgttcgtccttaaagaagaagaagattggcttcattcggacgtaaccacaaatcttttcattctttcttttcactgtatcttttctcatcccaacgccatctttcccggccacggcgaacctcgagttcttgcatggtctctaggttgatggtatagggcagggcacgcacgtgtgtgcttaacctgctgtcatttttgtttagcaaaaaactagtagcacagcatgtcagcatcgttatccggggacctctcatgcttataggagaacaatgtcgtgcttctttcctccacaaataaagaggagaactctacttcgcagttncggcgtcagacatctcaactcttgcaacgtacgtttccttgccgcccgggcaagtccgagtccgtacaaggaaccggtcgtcgagtcgagtggggcatctgaaaaagctcagcatccggtccggtccggtccagtccaagtgtcccactccccgcctgcagctcgacgaacggaggtgacacgaacccaacctgggatggggggggggggggggggggggtagagagatcagtacgtttccggacagagctggaacggttggtgcgccgtgcgcagttcttgctgacgatagtttagaaacgtttcggttggtgcgcgcagttcttgcggcgcctgccatgtctgaacctggacaccgctacgtctagctccgggacaggagacgagcgctttgaccggttctgattgtacacgagtccggagaagtgatcgggattcggggacagttgtgaagcttcgcaggctttgactaccgccacacacgtgtgtgtgtgtgcttgtttactagaaagatggcttggtttggtagcaatagcgacggcgaatttgagataatgacatctgctgctgtctgctaagaaagactggtcagtgactctgaataaaagaacctgcatacatgcagctagatataaaagaaaagaaacgttgaagcgtcgcatacctacttgtgcttgcgttacctacctttacccctgttggctgttggaaggctgaaacgggagatcgagctatattattattagtgccgtctcttgcgctgatgcactcctcctccgtcaggcaggagctgatctagccgcgtatttgtatttggacgaagtgcttgtctagatacgtaagtagctctaaacgaatgatcttgtttcagaacgtacgggacgagcagtgtagtattctctaacctggaaggaggagtgcaagcggatggaaaagaatagtttaacctggaaggagtgtattctctaaccaaaccaacggaaggacggcttgagtgaatgaattctgatcactctgtactatctgcttccctttccagtcagaaagaaggcaacatgggtgggccaaacnggccaccgtccaccctaagatttggcccaaagtttaagaacactacatatctttggcgtggaacctcagcaattagccgtacatcttcgacaacccgccgcgctgtttctccaacccgtcatcgaggcccatcgctaagcccagcacccagcctgcaattctctccaccttttaacacggtgtttggtccgggcctattttggtctataaccattcccgccacacttcaacaccatgttt

SEQ ID NO: 4996 - DNA, 2426 bp, Zea mays
tgtctgtcagtagtgttaggtgagaccaaactgtcgtcgtaatatttttccagcagtttaatggatggcccgtttcctctctcgtgtttcttcacaatgtgattccttcgataacactgtcattgccatcctgtaaagtactgaacagtttctattttagccaggacagctactgttgatgtggatttataaccgatgacttctcctaaatttctcatcttaataccgagcatgcaaaatcctgagcatttgtgagcactgaacatggcttattgctccagttacttgtacatcgtctaaagtttacgccggcctggcctgcacagatggacggcaaaacaataaaggctcagatctgggacacagctgggcaggaaaggtaccgtgcaattacaagtgcttactaccgtggagccgtgggagcactgcttgtgtacgacatcacaaagaggcagagcttcgacaatgttcacaggtggcttcgtgaactccgcgaccatgctgactccagtattgtgatcatgatggtcggtaacaaatctgacctaatccacctgagagctatctctgaggatgaaggcaaagcgttggctgagaaggaggggttgttcttcctcgagacatcagctatggaggctataaacgtggagcaagccttccagactatcatgacggaggtctatggcattgtcaacaggaaagcgctggctgccaaagaagcagcagctgcaactgcttcgttgccctcccagggtaaaattatcagcattgacagcactgcaggaaacacaaagagggcatgctgctctacctaaaaatgttcaaacaccacattatacagaaccttggagacaattgttggtagaaaatggagcatagtgatcacaaatgatgtggtggcaatatctactcttattctattctattctattcttttcttttctttattgtgtggacaaaatgggggtacatgcagtttagtttgttcagtgtgtgttagtcaaaagttagatattttcgttaggatccataccatttatcttctcaagttaaatgatactgcagtataactcagaatcatatagtcccaagttgctacagaattcaactgcgaatttgtgatttcatcatgcttacattctaaaaaaaaaaaaaaaaatattaagatatctttgtgcagcctactctgacaggagtttgttgcatgctggtacctaagccactcttgttccataactacagtaggtgttggaaccattgaataattagtttgtgaacagtttccatgactatattgggcagactgggcatgcctttgccctagtaaaattggtcctagtgctcgtggtattggtgtttgtcgtagcaaatggcagtattgctccctgtctagccgtcgttgccacccatgggccatggtgatgatgttcctattgcctgtagcgacgtgagtacatgccaatgacgtgtctcgactctggatggtaccggtggtgccctgtaatgtcttctgcggatgcgtggcactctgacttaaattctaggggccgatcgattgctcggatcagccttctcctttcccttgcagcttgaggccacattgaccatgttgattgggaatggattcctggcgatttccatcgggttttcgccaaaaatgagttgtccttgcttaatggtatattgtatctgttaccggagtaccttgcaaattttggtgttgtgggtgggtaaagttgtaccacttgcagtacttcctttcaactcttcagttgatggaatttggtgatcggctggcagcttgctagtttgataacactatttttttcaagggatttttatttttttaaagagaaaatgaactaattttctttggaaaaataaaaatcccttggaaaaaaatggtattgccaaaccagtccttaaagagtagatcgaaaatctgctcgaccttgattaggtcaaagttgaaacctatgggtgtctcgggcgccttgatccatgggcacgagatgtggtttgccacttggccctagtcaacaattgcgacttcggctgtgtcagctgagtcatcactttcttgttggacgtggataagagcctttctcccgaaggttgaagatggcaagtttatggttctattattcgtcatggtgttgtgcctaagagccatagctaccacaagaccctagaataatatagttaatcatagccactggttgatacgggcaaatcatatgtttgaagtacacaagaacgaagcaatgtcaaacaaaccttaaggctagcgtaggccatgcactcgctaggtcacctttgccaagactagttagccaatgcccaagcatcgaagaatgctgaagtttaccattagctctgtcaccacctttatttctagtgtttggaacatattccaaaggctcatg

SEQ ID NO: 4997 - DNA, 4254 bp, Zea mays
gcacgagaccattacctagaacatcctaaatcaaaaattcttcatcaagttattttcttgctccacggattgcctgctctgatgatctggtccttggcaagatcacactcgtgttcataaactcaccaactcactgacacccccgtactctttcttcttcacccacggccaagatagaactcactggcatgctaggcttcctctttttaattcaccaactccctcctccggcgcatccgcatccgaatctcaatccccacgggcacgaatctgacgctgcgaaaacctttccgccatgaagcaggaggggcggaggcggcaacaccaacaccaacaccacaggccgccgccgcgcctcgagctggctatggcgcacgcgcggggcggcgggggccacggccacggccacgaggaggaagcggaggcggccgtctgcctggacggcgactccgaggcgggcgaagcgcgcagcgcggggcgcgcgccgccgtggcgggaccagctgacggcgcgcgggatggtggcgagcctcgccgtcggcgccatgtacagcgtcatcgtcatgaagctgggcctcaccacagggctcgtccccacgctcaacgtctccgccgcgctcatcgccttcgtcatcctccgcgggtggacgcaggcgctcgcccgcttcggcgtcgctacgcgcccgttcacccgccaggagaacaccgtcgtccagacatgcgccgtcgcctgctacagcatcgccgtcggaggtgggtttggctccttcttgcttgctctgaacaagaggacctacgagatggctggggaggacacggaaggcaaccttccgggaagctacaaggagcctggcattggctggatgaccggcttcctcttcgccgtaagcttcgtcgggattgttgcgctaatacctctaaggaagatttttcttcgatttcagtctaacatatgttggcgctgggatgatttgctctcacctcgttaatctatctctccttcttggtgcacttctctcatggggaataatgtggccactggtcagtgatttgaaaggggattggtatcctgcagatatgccagaaagcagcatgagaagccaaggttacaaggccttcatctgcatagcgctcctcttgggcgatggtctttacaattttgttaaggttgttgcattcactgttaagagtctacttggcagatcaagactgaagaatgcaaagaaagaggaagacattccagtgcttgatgaaattcagcgcaatgagatttttacaagagacagtatccccacatggctagcctactctggatatcttgcactatcagctgttgctgtgtttgccattcccttgatgttccatgagatgaaatggtactatgttattatagcatacttattggccccggcattgggtttctgcaatgcctatggtgctggccttactgatatcaacatggcctacaattatggaaaggtcgcgctctttattcttgcggcctgggctgggaaggactctggtgttgtagctggcctagtgggttgtggtttggtgaaatcactggtgtcaatatccgctgatctgatgcatgacttcaagactggacatcttacattaacatcacctagatcaatgattattgctcaggctattggcactgccatgggctgtgtcattggaccactgacatttttactgttctacaaggcttttgacattggaaaccctgatgggtactggaaggcaccatatgctctaatctaccgcaatatggcaattcttggtgtccagggcttctctgctctgcccctgcattgtttgcagctgtgctacggattctttggatttgcagtggcagccaatctgatgagggacctcttgccaccaaagtacggcaaatgggttccattaccaatggcaatgggggttcccttcctagttggtgcgagctttgccatcgacatgtgtgtggggagcttgatggtcttcatctggcacatcattgacagaagtaaagcatctttaatggtgccagcagttgcatctgggttgatatgtggcgatgggctttggatcttccctgaatccttgcttgccttggccaagatcagtccaccattgtgcatggcattcaggtcttcacactagagtaacaaaatgctcgacatctgagaacagttccatgtccaatcggagaagctgttggcatgccaagtttgtcattaattagctgggatatgatacatgcaggtaggtaaagatgcagtgcctatctggatgttacctacatataatgacgtaatgtggtacccctgtaaaatttatcatatgcaagatgatacatcacattagagcaatggtaagtttgagaatttcaccccagtggtaatggatggatgcaagagctagcagtagccaaaattttgcaccataggttgtacccccacccctatagtttaatatggaaccacaagctacagtatacaaaccatcttccaaagacagctgaccctattgtcaatcacagctggttttggtaaaagaaaaatgcagtcaaatcttgcatgaatggttagcaaatcatgtatatatttatgtatgtctttgccataacttggattcacaagatgcaatgtagtaagaggcatcttggtcaggcatctgatacaattgtaaaatcatctgctgcgtccttttatcataaacaaaatcatcaggtgatgtatgcctatgaatagttagcaaaaggtacatatatggttatgtatattaaacacgttctgtgaagaagaaatgtaaccattcaacaagaacaatccaatgacacatttgtcagcatccggagaaggctatatcctcagatgcttgccttttcaaaaacctcgatagaagaaattaatagaggcctcgctattgtcagatacatattctcagggcctacattcccaggggcggacgtacataagcctgagtgagggcccaaccgccccactcatttctctgttgcaaatagatttctctgttgcagatagtgagcttagatttttactatacggtttcctaatcaacctaacttaaataccacagctctgatattttagtgctcgttcttttaaatataccctcacttatattttgttttggatctgtccctgtacatttctgaggacctaccttggctctagctaaggtagaggtcattagaccgaaggtctaaatcttttagagccttaaggacatgtaaggttgtctcaactattgtcgtttgtacaggactgctatatcataggctccaatgacccataaggttgtctcaattattgcagtccataagaacggccaaaatttgaggccattattccattcaaaataaggtggtgcatcatgggttatcaaatttggtgggatgatactattcctaatattagtattaactaattaactatgagaaataagatggtgatggatcaactcattccatttcacaaacaagtaaaaaaagtgagcagtaagaagataatagactagttcatttctcaaaccaaacatcctatatatacttactttggacgttcctaaacttagaactctctcggatgtctagggcttctagggctctgtacgagctcccaaatctttgaacccccggcctatgagttattacgaatgattcggtcctgaaaccctcctggactcgacgcctcatgaggacaataaagttttcaattcggtatgggagcacatgtaaagtaaagaatatagatgacctctatccctagagtaggacgcatcctaaaggtataacactatgttcaaacccaacccgtcaacctcgtggtagtggttatcttgataaggctcatttctatcatgtttaatatgatgggcaatgttatggttaaataggtgtattgttgccccgatataggtagcaggcatacgcaagaccactatttgatatgtgtcatcgtccgtatagccatgcttgaacgcgtcagggtactgtaaagtattataaagtatagatgactatattgattatcaattacgtcgtatccaatgacgtggatcggtcacacctgcctctaccgcaaaagggcccctagatgagttgattagatagtctgaatagcactcctaagattctaagttcgacttcccttagatcggtctcggtcttggtcccgattattctcatatgtgatatagtgtcgctatgtatgggtgggacacaggtttaaggggtattatc

SEQ ID NO: 4998 - DNA, 2540 bp, Zea mays
  misc_feature (8)..(8): n is a, c, g, or t
  misc_feature (10)..(13): n is a, c, g, or t
  misc_feature (2511)..(2511): n is a, c, g, or t
ggccgggnannnnttaccatgggtaccctcgggccggccggaagggcccaaggcttctctatctagggattcatcttcctctcgtcttccctcttcctctccgaggatacaaggcgccgtcccaggtagaggtagggtcgccaccatgctggaggagctgctcatcttcacccggggcggcctcatcctgtggtcgtcctgccgggcgctcggcgccgcagccctcaagggctcccccatcgacgccctcatccgctcctgtctcctcgaggagcgatccgccgacgccagcttctcccaggacaattacgccctcaagtggaccttccacaacgacctcggccttgtcttcgtcgccgtataccagaagatactccacctcctctacgtcgacgatctcctcgccgccgtccgcaaggagttctcccagatctacgaccccaagcgcacctcctacgatgactttggggacatcttccgccagctccaccgcgaggccgaggcgcgcgccgaggaaatgaagaagtccaagcaggccctctcgtcccgtccgcagcctgctctcacccagaagaagcctggtcccaagggccgcggcggtgattcccgcggcggcgctgctaacaagggcggctctggtgccaaggatgactctgatggcgacggctatggcaaccaggaccaccgtactctggcaaatggtgccttcaagggccaagagaatggcgtccgcaaggagaattcttctcatggccgcactgttgttgtcaagggaaaggagaatggggcccccaaggatgaaggggccttcgatgtaagtaaactacagaagctacgggccaacaagaagaatggtgccactgacaatggaaccaagaagctgaccaaacctgacataaagaagaaagggaagcaagatagggtgtgggacgacaaaccttccaacaagaagctggattttacagacccggcagacgagagaggggacgaggtgacagacaatgtggcggtcatcgagggagaaagcatgatggataaggatgaggatctgagcagcgacagcgaggacgaagaggtggaagatggacccaaaaagaaaggatggttctcatcaatgttccagagtatttctggtaacaatgtattggagaagtctgatctgcagcctgcgctcaaagctctcaaagataggctgatggcaaagaacgtggcagaggaaattgcagagaagctttgtgaatctgtcgcagctagccttgagggcaagaagctaggatctttcactagaatatcatcaacagtccagacagctatggaggatgcgcttcttcgtattttgaccccaaggcgctctattgacatactgagggatgtgcacgctgccaaggagcgtgggaggccatatgtcattgtttttgttggggtgaatggagttggcaaatccaccaatcttgcaaaggttgcttattggcttcttcagcataacctcagtgttacacttgcagcatgtgacaccttcagatctggtgctgttgagcagctgagaactcatgcaaggaggcttcagatacctatatttgagaagggttatgagaaagatccggcagttgtagcgagggaggctattcaggaagcaacccggaacaaatcagatgttgttctggttgacactgctggacgtatgcaggacaacgagccactcatgagggcactctccaagctaatcaatctcaatagcccagacctggttttatttgttggagaagcattggttggaaatgatgctgtggatcagctcactaaatttaaccagaaattagcagacctatctgctgttcccactgctagattgatcgatggtatcctgctcaccaagtttgacaccatcgacgacaaggttggagcagcgctttccatggtctacatatctggagctccagtcatgttcgttggctgtggtcagtcctacacggacctgaagaagctgaacgtgaaatccattgtgaagaccctcctgaagtgattgcaccaccgtgttgaagtgcagtctgcccaaagtctgttatctattgtatccccagtgacctttgtcatcctcatgttggacgtcgtcgtggatttgtaactgtcggagttgcaacaaaacttgtgtgcttgcgtcaacgtgtgccgtcttgctctaataatgcactatctgcattttgaatgggtaaaaaatggatgaatatgcgagtttgctatcatctggatgttaccagattctcgcgcctgcccccgtgcatgcaagcgaaaccagtcacgagctcacttcatgtcttgatgtgttggcaagctggaagctgcatggatgtctgacatgatttcattcagcgtacacggttgcttgcaacattagtaatgagtagcgtgttgtcttgtggtgttcatacgtaagggttctgatccccttgtgtgcaagtctcacacatacaaaaacctgatacatacgcgtcccggaaacatgtgcccttncgtattcaggcttcttattttttttaaaa

SEQ ID NO: 4999 - DNA, 1096 bp, Zea mays
ccctgggcatgcttttacgcagcattaactcctcgtctgcaaccacgatgctactcaatttcatcaactccaaataggctccctccacaattcatgtaacatgtgcattagtttatgggccttcaccaacagggaaggatccaccaaggagtttgatcaacatcctctcggcgtccgcaattcctctggaatatagcgaagaatgcagctgggctcccatatttgtgaggcagtcaaatttcaagttacctgctgacccatccactccgattatcatgattggtcctgggacagggctggctccttttagaggtttcttgcaggaaaggttagcactgaaacaatctggagcagaactgggcacttcaatccttttctttggatgcaggaaccgtaatatggactacatatatgaagatgagctgcaaactttccttgaggagggggcgctttctgagctaattgttgcattctctcgggaagggccaacgaaagaatatgtgcagcataagatggtggagaaggccacagaaatttggaacatcatctcacatggtggttacttatatgtatgcggtgatgccaagggaatggctagagacgtacacaggatgcttcatacagtagtccaagagcagggatctttggatagctccaaaaccgagagctacgtaaagagcctgcagatggaaggcaggtacctccgtgatgtatggtgacacatcacccccattcagccatagctctagcgtgtggaagtaaagctggctttgcgtgtacgacatgcctaatgccaaatgaagcgtgccattgattagaaactgaaatgttcagtcgatcagtgtaattctttgacatctaactatttatcattatatggaatgggaggaactgttgtagatttgtagaactacaaaaaaactgtgtatccctaacaagtttgtagcaaagggggtacattattacagtttgagatgaggacatcatgtatactgtttgagacgaggacattatgtatatacttggtacattagaaggccaccgaaaacaaattttgcatctggtttttgaaagcatgtgctcctatcggccccta

SEQ ID NO: 5000 - DNA, 4618 bp, Zea mays
ctttctcccctcttcgcccccccgctgccgcgcccacgcccacgcgcaatcagaactgccggccagctccacctccaccccccgaacggctataattaggcggttgccggaatcccctctgtctcgcaccgcagcaattccccggccccttcgcaccgtttccctctgcgctcccaccccccgcccccccgaaatcaccgccgcgccccgcgtctcgcccacgctcacaaggaaaggaggggaggagaccggggcccagacgccaacgcgcggacccctcgagtagggcgaggtccgggctccgctcccggtttccggggagagtgcggaggacccccatcgtgcgcgccattgaactctgctcccggctgctcgccggggagagggcggaggacccgatcgtgccgtctcaacccgctccgcacccgcgcggccgcgggcgtggtgctcccgcgccttccgggcgcctcctgcttctccgtgcgccctcggctccatggaggccggctactgcaaccgcaagaagaccgacggcatctgcgagtcagtctgcgacagcgaggtgaggcaccgctccggctccagccagacagatctgtccctttccctaccgctccgccgcgtgtaacgcctctgcggatcgcctggtccgccggggggagacgcggacgcggtcgtcgcggtgcttgtcttttcctcttccacgctgcttaaacgcgttttgctccacgctgagctgcttgcttgcttcgaccttttcaccgctccagttgcgcggcgtgttcgcggcggctgctattttgccgatctcagcagggttgctgtcttggatcgggtgctcgtgagatttccacagcctgggatcgcatatgctcgcttaattgcgtccgcggcaggcatcttccacctgccgcgggtgctgtggattaggtggtgctaaacaaactggggcgcctggatgcttccggctgcgctagaatctctccacctgtatggatcgggtcgtctgcctaataccggaatgaatctgtctctccacctgtaaaagtttccagcttttttttttgaacaatccccgattggttcccgtgccgtagatggtgagggttcatgccgcaaaagtaattttacaggctgtttccttcctttatatgatacacaaataaaattagctgatgattgctttcctctgttggtggatccgcaccagcctatcactgataggtttttggtcggcgacgccgaaaatgcgcatattccaccagaccaccgcttacttctttaatctactgcacatgcattgttttgatggcctttaacacagctgcacactcacggcgcggcggatattttagaagctcgtgttctcaacataggagtttgtgatggctgtgatgttccctatgttcagccgttggattcatggtgctatgtcgtgtccagccagctttgtgcttgaataaataaatgctcatacgctcatgtagccagtatttgccgttctcatgtttagtaaattaaggcatgttccttctttttgtgtagcatttgtttcggcaaaactcaatgatgcctctgtctacaatgcactaggtttcagtgttttttaacctctggttgagttagtgctgcaaaagtgatctcctgactcttgactttggaatgatcagcactgtttcagagtacagttcattgtatctgtcacatgttgtagctttccagtttacttctagtttaatttatgccttgttatgatgtgtattggtgcatgtctgatttcttatttgctccctgatactgtctgcagtttggctcgaagtcagtcctgagcatgtcaaggctgaagtgcgcactgcggggatttgatctgagggttctcttgatcctactgattggtgtgccaattttgatctttgccatatatgtgcatggccagaaggtgacttacttcctccgaccaatctgggagaagcccccaaagcccttcacaatactccctcactattaccatgaaaatgtctcgatgggtaacctatgcaagttgcatggatggaaagtcagggagactccacgccgtgtctttgatgccgtgctcttcagcaatgagcttgacatccttgatatccgctggcacgagcttagcccgtatgtgtcagaatttgtgctgcttgagtccaattcaacttttaccggcataaagaaggaccttcacttcaaggaaaaccgccaacggtttggctttgcagagtcacggttgacctatggcatgataggtggaaggtttgtgaagggagagaacccatttgtcgaggagtcgtatcaaagggttgctctcgaccagctcattaagattgcgggcatcacggatgacgacctgctgatcatgtctgatgttgatgagatcccaagtggacacaccatcgacctcttgagatggtgcgatgacgttccggagatactccatctccagctcaggaactacctctactcgttccagttcctactcgacgacaagagctggagggcttcagtgcacagatacagagctgggaagacgaggtatgcacatttccggcagacggacgacctcctagctgattcagggtggcactgcagcttctgcttccgctacataaacgacttcatcttcaagatgaaagcctacagccacgtcgaccggatcagattcaagtacttcctgaacccgaagaggattcagcatgtgatttgcgaaggggctgaccttttcgacatgcttcccgaagagtacacgttccaagagatcatcgccaagctggggcctatcccgagtacattctccgccgttcatctccctgcctacctgctggagcaattcgatcggtacaggtaccttctcccaggcaactgcgttagagagagtggctaggcagctggctgcccgccgtctgcatcatgaccctgaggcgcacggacgtcgctcgcggatgtctgtcttatggtggcgtgggggttgtgtccgatacgattggctgacttagttgagtgatcgcttggctgctggttgagttcatatgggatttttgtgtaccgtgtaacagaaaccatggaaggcctgacggctgcgtagcgcagcgcgtgcttgatcgctgctgcgttcttgtttggcagaggagagctgagagctttttgttcgttgcttccatgattgatatatgatgaactcagaacctgttgtagatctcataccgacgagcgacattcagattctttctttctttgctcgtgatgtacattgccgttcacttacctagttacgttgagccatagatgtttccaatccagtttctgactgtttctcatacctgttgaccataaaataattttccgggatgccatctgtttgctctattactcgaagcgccgaggtggaaacgattcttactgacgtctcgccattggtaaaagcaggctggttgatctccaggcggggggtaaaaaaaggtgctctttttatggtcgttggtggttggtaagatctgaattgaggggtttctgcgtttgcgaaggattcgtttgttgattgcctgagcaagggcgagcaacccgtgatgagaggcggggcatgtgtggggccttgcctggctggatggagctgagctggtgcgaacaggctgttgctgtcgtgcgtgcacagtccacttcagccagattggcgaacatgctgcgaattggctggtcgtatggctcgtagcgtcttgctgatgctgcctcgctgtgccctgttcctgcactgcacgcccatcaacagtttcagacgagcctttagggcttgctcgttctactgtgtcaattcatgtggattggggtgtattgagtcggctgccatctttttggtgcgctggtcggagccgagctagtcgtagttgcagttgctggcgccgtcatccgcagatttttccagcctaccagggatgtactggtgggcggcatggccaggccagggatgggcatcgaccgcttcgtttgtctctggtccttcctgcccggggcaaacgcgcgtacggcgtccctgtccccgctagctgccggcttcgccgcccgtatcgccgtgtccgttggaatctcgctcgtcgccacagatagatagcgcttggtttggtttgactcgtccgcacgtcgcggccacgcccggtcgtcatgcaccaggaaaatgtctccgttgctaccgcttccaagctgcaaaaacaaaagctccagccaacagcgtcccattccatgcagtcgtactaccgcgaccactgttgttgagttgattgcagcgcccacccgtggccgtgggtgggtttgccatgacagctaccaccagtggtatttcgtcattatgtggccgctcttatttggccggttctgccctagtacaaaagtgtttccgtgcatctcgaggaccggaatggacgtgtaggggagtgaaaacgggactaacaacacggatggacaataagtcatcctttatcccaatcctaatatatttctaaccaaattcgagctgagatacacatagttcgaaacagggacatatatggatacatggaccatatatttattcagatagataagtgacagatacatatattat

SEQ ID NO: 5001 - DNA, 1113 bp, Zea mays
caagaactgaaactacattgtttggagatagttcatcggaaatccttgatgagcctcagatggtgatgtctgctgaacctttccatgcacctgcttatttgaaccgttgggcttagaattatggatattgctagcactgaagctggaaacattgattcatatagcatcttcacacctacatgccatgcatcttttgcctcctcaaagaacaaagtgatgaaaaggctacattctgctggaaaaatgggagaacagtatgatccatgcactgagaagcattcaactgtatacttcaatctagctgaggttcagaaggcacttcatgttaatacagtcattggaaaatcaaaatgggagacttgcagtgaagctgttaatactcattggggggattgcgaaagatctgtgctgcatatctatcatgaacttatacagtatggcctccgtatatgggtgttcagtggagatacagatgcagtgattccagtgacttcaactagatacagcatcgatgctctcaagcttccaacaataactccatggcatgcttggtacgacgatgacggtgaggtcggtggatggacccaagggtacaggggactcaattttgtgaccgtgaggggagcaggtcacgaagtccctcttcatcgacccaaacaggccctcacgctaatcaaatcgttcttgactgggagcccaatgcctgtgcaatccagcacacacagcaacatgtaatccgtgttgttgcaactgattcacgagatgaatgaacatcccgaagcacccaagtcagccagttgtccaacccggcttgttctgcaacttgctgtagttgtttatgtatcagagctaccggtgccggttaccgcagcaaccgtgcttttgtcggccctgttggtgcttgttgcagtaccagttatcccctaaggcaggggacagaaactgcggaatagtttttgtttgcattgacgtgacagcactgtaatcttaaacatcgtaccatagtcctttctatgacaaaggtgtggtttctgatgtctgcaataaatgatctggacttggggggtcaaaatgaaatacttctggggtacagtaaaaaaaaaaaaagcggcc

SEQ ID NO: 5002 - DNA, 2611 bp, Zea mays
taggtcagcaagctgcattcctgtatatagctttgttttatgatactgatgtcctgatactgaataatttcttgtgtatttggatgagtaattgaacagtaggaaatggcacaggaatgggacgtacttctgacacaccaacgccacacgttcagtggttaactgacgtagctttatttgcatgtagctggcgcaacaagtttaataacggacccttaattaatgttaacgacgtataataggtgaaagtaaactgatcccaggaatttaataatgtctacagtgttttgttagcctgttggtttggttttaattcgtaccggtttctactgcttctacattgttttatgtctatggattacagatacagcagtttgaacatctgattttaaagtagaagccaatatcactctttaatctgacagtgatagctgcggtagagacggacctacgtgtaatagagtgaggacataagtgtaatggagtgatgacataagtctccactcatttttgtgttgtaagtaatagatactagattttcactattatatcttctgctcagctcaatttatatgccaccgctcttatattttggtggtcttctgctcagctcacttccattttacccttggtccgcccctgagccgcggataccactgctgcctgatgctttgatctcactgatactgtattgctcatgtagcgaattaaatgtccacttgaatggtataataatgtcaaagggaattgccccaggaacaatgcatccatgcgaaccacgtggggagggttctcgatgcaataggtactattggctggcagcaagcacgtccctcaaggtcagatcttgttcagtgcctgcggagtatatgataatatgacaaatctcagcaaacaggaagcatcgctacaatattatatactagatgaggaagcagccagaccacacacacccacacaccccgcttcacgttctcaataatggcgccgttcccacgtcgtcttccggccgccgtgccacttctcctcctcctcggcgccgcagtggccagcgccggcgcggaggacaccgatggcggcaactcccgccggcggcactcccgcttgctgttcgcgttcggcaactcgctcaccgacacgggaaacggggccatcttcccggtgactgcaggcgggccattcacccggccgccgtacggggagaccttcttcggtcgtcccagcggccgggcttgcaacggcaggctcgtcctcgacttcctcggtacgtacgtacgtatatgcatgtcaccaacatcgtcaaacagcaacgtacgtatgcatctataactatacatgcatgatgcatgcagtggaggagctgaaggtgccagagccgacgccgtacctggccggcagtacggccgccgactttgcgaagaacggggccaactttgcgctgggtggtgcaacggcgctcgaccaggcgttcttagcaagcaaggggataaagtcgttcgtgcccatctctctcatcaacgagacgagctggttccagaacgtttcgaagctactggacgcgtcacactacggttcataaatactatatataaaagcgactatatatatacaaaatattattgttgagctaaaacctctcgtcttcgtttgacgacgacagatgagcgtaagatcatggcgaagtcgatcttctacgtcggggagatcggtgtcaacgactacttcgccgccctaagcaacaacgactccgtcgacgtcgcggtcagcctggtgccgcacatcatcgacaccatccgttcggccctgaccgtaagcgtcgatcggccggaggagcccaactcgctcgtcagctcatcagcgtctgttaattattagttatgaacaataaacctgggcaggtcatgatcgatgccggggcgaggacagtggtgatcacggggatgctaccgatcggctgcgagccgcagcagctggcccagttcgcaggcggcccggccggcgactacgaccctaccaccggctgcatcacgcggttcaaccagctcgccgagcaccacaaccacatgctgaggatgatgctgagggagctgcggaccaagtaccgcaggcgcaggcccctcaccctccactacgccgacatctaccgccccgtgatcgaggccgtcgcgtcccccgcctcgtacggcttcggcgacaggccgctggccgcgtgctgcgggggcggtggcggccccaacaacttcaacttcatcgccttctgcggcacgccggcgtcgaccacgtgcaccgacccgtccaagttcgtctcctgggacgggatccacttcaccgaggctaccaacaggcttctcgctcgtaaaatgcttcaggaactgctaagccgtggagcttacaatgttgcaatctgattttttctatgcccgcgagtcgtatcaacgtgtttcccatagcggatcggacctagcgtggaacctcttgtgcaataaaaaaataagtgtcatcacattcctcgcctttgacgagagaaccggatttcctttttcattatccaataaaagatacattaccgttgaactagtaagaggagggctgtacgctgtacaggatccaa

SEQ ID NO: 5003 - DNA, 1876 bp, Zea mays
attgggacctcgaccccggccggcgctgagtctctcacctgctggcggaggcggcccccaaaagccaaattccccagcccacaccacctccacactccaggttagggtttgctgtcggcgatgtcggatcggcagccgtcggaggaaccggaggagcaggtggacctggagggggacgacgacggcatggacgacgacgacgccgggtaccgtcgccgcggaagccgggacgactcggaggagcccgaggaggatgacgacaatgacgagcgccacggcgacgccgacgacgacgccgggatggagccggagccggccggaagtaaaggcggggatgacacgggcaaggggcccgacgtcgccggtggcgggcccgaggacgaggaggagaggagcaagtgggatgacatgctcgccctgccgccccatggctctgaggtcttcattggtggcctgccccgcgacatcacggaggaggacctccgtgagctgtgcgagccgttgggagaaatatatgaggtgaggttgaccaaggataaggacacaaaggagaacaaggggttcgcctttgtcaccttcatggacaaggaggctgcgcagcgcgccatcgaggatgtgcaagacagggagttcaaggggaggactttgcggtgctctctgtcgcaggcaaagcacaggctgtttgttgggaatgtgcccaaggggctgagcgaggaggagcttaccaacactatcaaggggaagggtccaggtgttatcaacattgagatgtttaaggatcagcatgacccaaaccgtaaccgtggcttcctctttgttgagtattacaaccatgcctgcgcagactatgccaggcagaaactttcatctccaaacttcaaggttgatgggagccagttgactgttagttgggctgaacctaagggttcaacagatgcttcatctgcagctgctcaggtgaagactatatatgtgaagaacctacctgaaaatgtttctaaagagaagataaaggacctgtttgacaaacatggagaggtcacaaaaatcgttctgcctcctgccaaggctggtcataagagagactttggctttgttcactttgcagaaagatcaagtgcattgaaggcagttaaaggaagtgaaaaatatgaaatcgatggtcaagtactggaagtgtccatggccaaaccattggcagataagaaacctgatcattcacacaggcctggaggaggccctaattatccccttcctccctatggtggtggtggctacatgggagatccatatggtgcttatggtggcggcggtcctgcatacaaccagccaatgatatatggcagaggaccagcaccggcaggaatgaggatggtgccgatggtgcttcctgatggccgccttggctatgttctgcaacaacctggtggaatgccgcctccgcccccaccgcggaggggtagtgaccgaagagacagtggcagaggtggcgaagggcacagccggcgatatcgcccttactagcttttcccttatgggctctactcccatcatgtggtatgaagcgtttaacttatgagacaacgagataggagcctgtgttcttgtcccagtataagatctgcgatggcacgatgcttgtaccatctgtttcttcggtgacttatttttatcatgcagtgcatgtgacttgaaactgtgatggacttgtattgctttctgccttatggcacctgtagtagtgaactgatgaaggaagttcatgcggactctgaagctttgttggcttagaatggtaattttgctgtattctatttcacaggaaaaaaaaaaaaaaaaccttagcaattgccgttcactcgagactagctcgtgc

SEQ ID NO: 5004 - DNA, 2085 bp, Zea mays
  misc_feature (16)..(16): n is a, c, g, or t
  misc_feature (29)..(30): n is a, c, g, or t
cggccctaccctcctntttttttctccannaccactttccctttgggacgaacacagaatcaccttcctttgcaaattgtcagtacccgatacaaccatacagctctagcatccttctactttaatcttagcaaatgacataaaccagttagcaaagtcttcgaacttccaggcaattttcgggacaagatcacagcatacacgaccaaagagcagctacacggaagagtacagagacgaataaagagacatggaaagattggtgtggggtgaagagactaaaagaatgaacaaggatcgcccgagcttctatttcaacggaagcataaggtttttgcacacccttactagcagcgtaaatgtctttatcttccatcggcagaggtgaaggagtccgcgaacccaggaggcctcgtagggatgctggtctgcgtgttatccaggctcgcaacaaacgacgaggtcgcaccgtcaaagtggctgctgtcctcgaacgcctgccatctcttcagagcctgaggcagggacatgttaaggtcgataccgtagctgtcatccgagtccggatcggctggtttccaaacttccgaaagggtagagagcacattgacagcatggcccatgtcaggcctctggtgtgcttccctagcgcagcagtggccagcaagctctgagacggtactaacactagcgtaggtttcctcgtcgaggtcaatgacagggtcgattgctttgcggaatgtttccttgttgagctgcatcctccggaaccatgtaactaaatgcatgctatcctcgggctgagtctcatcaagtgccttgcgtcctgtaatcagttccatcaagatgacaccaaagctgaagacatcagcttttgtggtcactcgtccagtgactgcatactctggtgcaaggtacccaaaagtgccagcaagtcttgtctctacggagacacacttcccatcagctggtgcaagccggaccaatccaaagtccgccaccttggccttcatgtcatcaccaagaagtatgtttgatggcttcaagtctctgtggataaaggtctgctgggcaaggctgtgaaggtactcgacgcctcttgcaacatcaagtgcaatgctaagtcgttttttccattccaatggtcgcaaatttttctcagaccactcaaacaggtgttggctcagtgccccctgtggcatgtactcatacactagaatcctctcattgccatcaaggcagtagcccagcagtgaaacaagattgcggtgtcggaccttggtcaaaacagcaatctctgatttaaactcatttagccccttgttacccataacaccagcctccatccgctttacagcaattttcgtgccgtcatgaagctcgcccttgtaaacagtgccaaaccctcctcgaccaaggatgttctcctcactgaagttgttggtcacattgcggagaacttggattgaaatgaccatatttccactttcaacaacatggatgtcgcgtggaccattgctcgcttggctatatgtctcgcttgcgcgagcaccatcgttagcatttccccctgcaactgtgattttaaccatgtcatctgaacctgagtgtcgcggatggataaccatggcatgtggactctgcacccttccgaaaggcttctgtttcctcttgtaacaatagaatcccaatgcagcaacaaggcctagtccaacgactgtaccagccactgagcctacaatgactccaacagaagatggagaggaacccccattgttaccaatgcttccgctgctgcctccccccgatagactgtcgttgctaccacctgatcctgctgttggtgcaggagcatccttgcctatgttagggttaccagcagttttcaccactgcactcttggaagcaaatgtaggaagtttcccatatagattgttgtttgacaaatcaacctctgtcagcgaaggcaacgcggcaacctcctcaggcacagtaccagtgatgttattgttagcaagatttagcaccttaagtgagctaatcttcccgatggacggtgagatactaccactgagacccttattg

SEQ ID NO: 5005 - DNA, 2177 bp, Zea mays
  misc_feature (2160)..(2160): n is a, c, g, or t
  misc_feature (2170)..(2171): n is a, c, g, or t
tcgctttgcttccggacgggtgtcgccgagggcagccgccttttaaaacccccaccgatgtcccgggccgggaaagagggaagccgcaggcagcatctgcatctctcgcccacctccgctccgcctactgctgctggtggtagggaggcggagaaggaggcccttgcgcccgcccgccggccggatcagagccgtagcaaccaccacccatggcggacgtgcacgaacctttggtgcgccgtaagaggaagaaggttttggtggactacttggtgaagttccgatggatcctcgtgatcttcgtggtccttcctatttcaactctgatctacttcaacatcttcctgggcgacatgtggtccgccatgaagtcggagaagaagcgccagaagcagcacgacgagaacgtgcagaaggtcgtgaagcggctcaagcagaggaacccgaagaaggacggtcttgtttgcacggccaggaagccctggatcgctgttggcatgcgcaacgtggactacaagcgtgcgaggcatttcgaggtcgacctttcttccttcaggaacatccttgagatcgacaaagagaggatggttgccaaggtcgagccccttgtcaacatgggtcagataaccagagctacctgcccaatgaaccttgcccttgcggtcgtcgccgagctcgacgacctcactgttggtgggctgatcaacggttacggcatcgaggggagctctcacctctatggccttttctccgacacggttgtcgcgatggaggttgttctcgcagatggccgggtcgtcagagccaccaaggacaacgagtactctgaccttttctatggcattccctggtcccagggaacactggggttccttgtctctgcggagatcaagctgatccccatcaaggagtacatgaagctcacctacactccagtcaaggggggtctaaaggagatcgcgcaggcctacgcggattctttcgcgccgagggacggtgacccggcaaaggtccctgactttgttgaagggatggtgtacacagagagcgagggtgtcatgatgacgggcgtgtacgcttccaaagaagaggcgaagaagaagggcaacaagatcaactgcgtggggtggtggtttaagccctggttctaccagcacgctcagacggcgctgaagaggggcgagtttgtggagtacatcccgacgagggagtactaccaccggcacacccggtgcctgtactgggaggggaagctgatcctgcccttcggcgaccagttctggttcaggttcctgctgggctggctgatgccaccgaaggtgtccctgctgaaggcgacccagggcgaggctatcaggaactactaccacgacaaccatgtgatccaggacatgctggtgccgctgtacaaggttggggatgcgctggagttcgtgcaccgcgagatggaggtgtatcctctgtggctgtgccctcaccggctgtacaagctgccggtgaagacgatggtgtacccggagcctgggttcgagcaccagcacaggcagggcgacacgagctacgcacagatgttcacggacgtgggcgtgtactacgcccccggggcggtgctgaggggggaggagttcaacggcgcggaggctgtgcacaggctggagcagtggctgatcgagaaccacagctaccagccgcagtacgcggtgtcggagctgaacgagaaggacttctggcgcatgttcgacgcgtcgcactacgagcactgccgccaaaagtacggggcggtgggcacgttcatgagcgtgtactacaagtccaagaaggggcgcaagacggagaaggaggtgcaggaggcggaggcggccatactggagccggcctacgcggacgaggaggcctaaaagctcgtggtcgttttgcttagcccattttaattagaacttgatggatgtagtgtgtgtctgtctcaagtcattttaattagaactcttaaagctcgtggtcggtcggtcagtcagtcagtcattgtcgttgatgtccagcgttgtgttttttttatattctctaatggaatctctcagattgattcgggaaaaaaaaaaaaaaaaaaaaaaaagaaaaaaaaaaaaaactcgaggggggggcccgggtacaaaaaaaaanaccccaaaannaaactt

SEQ ID NO: 5006 - DNA, 1690 bp, Zea mays
tttatattggatttatacatcctcttgaagttcttgtatcaccgcacctagagaattgtttacttcagttatatggcattatggaccattttcatttaggagacttctgattttatccatgctttacataattacattacatatttcaggctcttttgcattcatcacattgggttcctcgagcccggcgggcttttgcacaccatggagttaagttttcaagtctggaagtggacctcccagccatgatggctcagaaagacaaagctgtggcaggactaacaaagggaattgaagggctctttaaaaagaacaaggtgacttatgttaaaggctttggaaaactgtcatccccctcagaagtgtcagttgatttgattgatggtggtagcaccattgtcaaaggaaaaaacataataattgcaactgggtctgatgtaaaatcacttccaggaataacaattgatgagaagaaagttgtttcatctactggtgcactgtgcttgtcagagatcccgaaaaaactggtggtaatcggagcaggttatattggccttgagatgggttcagtctggaaccgccttggttcagaggtcactgttgttgaatttgccccggatatagtaccatcaatggatggcgaggtcaggaagcagttccaacgcatgctagaaaaacagaaattcaagttcatgctcaagacaaaggttgttgggtgtgataccagtggagatggcgtaaagctgacactggagcctgcagctggtggtgagcagaccatccttgaagcagatgttgttcttgtctctgctggcagaagcccatttacttctgggattgggcttgaaactcttggtgttgagacagacaaggctggcaggatccttgttgataagcgcttcatgaccaatgtgaagggagtctatgcaatcggggatgccatccctggtcccatgcttgcccataaagctgaagaggatggtgtcgcatgcgtagaattcattgctggaaaagaaggccatgttgactatggcacagttcctggtgtggtctatacacatccagaagttgcatctgttggcaagactgaggagcaggtgaaggctctaggaattgcctataatgtggggaagtttccacttttggctaacagtcgtgcgaaggccattgatgacgctgaaggggtagttaaggtgatcgcagagaaggaaacagataagattctgggcgtgcacattatggcacccaatgctggtgagatcatccacgaagctgtcgtcgccttgcagtatggagcatccagtgaggacgttgctcgaacatgccacgcacaccctaccgtgagtgaagccctcaaggaggcttgcttgcaaaccttcgataaagcaatccacatataatttctcattttttgtgtccaaactccaaagtttgtggtaattttgggtctgttggaaaaaaggcccctgattgtccttttgtttttgtcggcaatactgtgaattgaccctttgagttgtccatcttagcggggttttgtgcttccttggcttggtttatccatccaaataataacctgatactatgttttacattttatgcccatgaaccattgatggatatacatttctaaggttccagtaaccgcagtgttttgcgatgtttacatgtgactgttgctgtgagggcc

SEQ ID NO: 5007 - DNA, 4980 bp, Zea mays
  misc_feature (868)..(868): n is a, c, g, or t
gccgaagctcgctgtttggactcgatccgagccttgcacgaataagcgggtcgggctcggacaagaaactaagtatattgggctggtccggcatggcccgtttacctctaaacccgtcaaacccgttttttcaataaaccgtgcttaccggcccgcttagcccgtttttcggtccgatttttctgtgcttaccagaccgacccttttaggctcgctgcggaccggacttagacagggaaatgagcccacgagtttaaataggtcgacccagttttctaaccggcgggacaggcccaaaatgagtcgggctttatcaggccgaaccaggcggcccgtttggccatctctacctggggcagaggaaacataatttatttatgaggggcgtgattagcaatgtcgtgacgacgaggaacgattatcatcttcctgaagaaagggaacccttgattacacgaagccctttggctaacattctgcagcaacctgggggcccgacaaaacgcttccgtccacgcgaaactgatcgaaattcggcagcgctttccgcctcttttctgagtctctgacccacaagaagaagcaatctcccccagtctcaactgttttcacgacgccgaagcaaaccgcttggacgttcgtcgttgtattttgctgccgcaccgcaggccgcagcctgctcttggccacgcgaagttgcgaacgatctataacccaatcccacccaccggtgccggtgcgtcggtgatcggcctgcggcgcccacgaacgaacaggcgtcaggtgcgcttcagcgcgtcgcgcggaggcaccgtgctaagattccgcgggcacgtcccagcaagcgctggagtgcacgcgcgcgcangacgctgcccgttccccacccaaacgcacgcggggaagcgccgcccgcccgaggagaggagcgcttcccgtttccgtgcccgcaagacctgtctgtctgggtccggtgggtctccggaccaggtgtcgagtgccccgctcgctcgcgtagccgcgttgcactttttttgcttccgtccaaacgcaggacgcggaccaacccacctgctccattttatgcttcgccctcgctcgcctcgccctcgccgcaacgctttgcgatagagtttctgtctgctaccagcaccacagcctagcaccccaccgcgtctagggttttctgctccaatggccgccgcgagggcagacggggagcgcaggatcggggtggccatcgactactcggagagcgccaagaaggcgctggactgggccatcgacaacctgctccaccacggggacaccctcgtcgtcgtccacgtcctgcaccacggcgcggaggagaccaagcacacgctctgggccaagtccggatcccgtaagctccccccactcaagctctcgccgcatccatctctaccctacccttacccaaatgctcacccgctgcccgctggtgtctgtttcggtttcctgacggtcttggctcgtcggctcaatctgattcgctcgatcggtctcgcttgcttcgatccccgcagcgctgatcccactctccgagttccgggagcccgaggtgatgcagggctacggcgtgcgccccgacgccgaggtgctcgacgcgatcgacacggcagcgcgccagaagcaggtgcgtgtggtgtgtgtggacggcgttcgtgctacgttctggtcgagcgagttgaggggggataaccgaacacttgcccgtctccgtgctcatcagcggtcccgggtggcgaagctgtactggggcgacgccagggagaagctctgcgacgccgtcgaggatctcaggatcgattccctcgtcatgggtagtcgcggcctcggcccgatccagaggtatagtacaatcctaagactccattactactactatagtactattgaaatgttgcctcatcaggactggaatgcgctgttcagcctctgatagtaagttagtttctcgctttttctttttgttcggataagcgcgtcaattgagtgtctggaataaatggatatagtctagcgtgcatggatggctcgattgatgatagggatagcccgcatgccaagtcagtatgctggtgcagtactgaaatgttcaaacacagcacatctagttcttgttcttaatagcaatacttatctgaaaaatgctcttgttccttgtatcgttgcatccggtgattctgagctgtgaacgtgattactatatacttatttcttagtagccgtgatgagccacgcgatgctgccttgtgagttgggacctttttctaactcgcaagggggcattgtctttagcctgtccaagagttgtgaggttcgagacatcccaacatcatcgtgattgtcatttttttatgcagccatgtgaaactgtcgttgatatttaaatgctctacattagtttaggcatttgaaagattccgtataggatcagtcgaccaatgccgtggctgtgttgttcaacgctcaagttcatatatataaaactatcactagtgggtaactgcgtatacaagggttcaggaagttttttttaaaaattcagctcgatatcttgagttcttgacatttgtgtaacagactaacagctttctaccataagaaatggatcatttgtgtcgagaaacggctagaaaaactccttacaatattaatcagtgattcattttttttattgtcaggaaaaatgtccagccctgccttgctacatatttgtatacttagactgaaagagggcctcagtttttgctactctacctttccagttacatagtactcgttgttgaactctttgccccgcttaataatttagatgtcataaatcaaatttgagtgcaggtctctcccctcacttcttttatttgaaactcacgatatctggcactcaatatgaatgtaaattaccacattccctttttcatgcaacgccagttgctgatgacggtggtcgcggcctaggtactggggcgacgccagggagaagctctgcgacgccgtcgaggacctcaggatcgattccctcgtcatgggtagtcgcggcctcggcccgatccagaggattctcctggggagcgtgacaaactacgtgctgtcaaacgcatcgtgcccggtgacagtcgtcaaggggaagtagtggcctgggcagcgtgccagtgatatgaatgaagatgctagcgtgcagtttgtgtgggttatagctaaacactatgttccgtcttgttgctgcatttcaataaagcatgtgtcttctagatttcacaaatctctctgaggctctgacctctgtcttattagctgtgaaactgtccgtacttcattcctgttcagatcgaattcgaggattggttcataccccttttactgtcgtgtcgtttgaactgctggttagtctgctcaatttgtatttctgattgtcttgcaccacgtttggattgcagcacagagtggtccgatcctaaaaccgactcttatcgttttgtttggtttgagtcacgacatgacgacgacgtcctctgaaatttacacagcagcactgttaattttgccggacacccaaactcaaatatgaaaccacccgaacaccagtttgggtgataatccaaatccgagaccaaacctcatggatccccgaaacctaatctcaaaggccaaaaccacaccaagcacagcacccctacagctcaaacggttaaacccaccaaaaggtccatgtttcacaactcaaaagcatgttccagctccacacatttgatctctctaccatacatactgaccatgatctgttgcggcgtgtagtagcgtgtgttactgacttacagtagcatcccagggcggtttctcttgttgccgcttgttgcggcgtctagtagcgtgtgtcaggattggacaccagatgttgatcggatcaaaggacactgtctgtcggagcgcgagtaaccgtgaccagtccataacgaacggacatagaaagcaagcctggtttacacctcagtcacaacagggccaccaaactccacctcatccttttccatcatactgagagtacgggtaagtaagaatagtaggaacataatttttttttaaaaaagaagggtaaggacagattatgtacaacccaaatctttccgaaagatagcaggaacacgcacatatagcaggtgatcctgcgagctgcagactctttggcaactgcttttatcaaaactacttcaggctgacctaccagttcattagtaagttcagcactgcacggctgcacatctaaaaccacaagaacacacttagcgaaaacaggaacacaaaaggacgcagcctacatccacgtctgtccaggtgtgatgatgcatctaaatactgcctccaccgaccggattacagctattactttcggtccatgcctaacggctcgcatcaacagttccaacactattatgacaaaccaagctcagctccaccccttttttattcctgaaaaacaaaaggagaacaggatgtgaataaaatgatgtgaggccatggagaaagcatcgcaagtaacagcagaaacaggggtagcgcaatagggtgtgaacaaaatgatgaggccactgagaaagcattgcaagtgacaggggggtggcgggctgctaggattcaaggaagtgtaggctgtcatgataagctattcaaaacatgatcaagtcctatgtgtcaccgttatccttaatgcctatgccttatatacctgctaccgttttttctttaacaagtgacacttgccagcatcttaatcataaggtaacacttgcaagagattgtaatactactacttgccatgaaattgagatttagaacaactaatccaccaagatccgcagttcacttcaagttacacaaaaaaaaaagtagtggaggtaaaaactgatggtgtgatataacctgctctaagctgctaagataaactttctactacta

SEQ ID NO: 5008 - DNA, 1638 bp, Zea mays
gcacgagcctccctcttctttccggtgccgagcgtgcatcggcagagctgactgtgactggtgaccggagtagagaaggaagcctagcactagcagaaatagtaggcagtagcagggttgaccggaggggcagtggtgacccaacaacctccctcatcccctccccttctttcttattgccaccactccacgtctccaccaaacaaggcaacaagggagaagtagatctgcatctgcgagaggaggcagcgggggtggtgatgatggagagccagccgctgcaggccccgacggccacggctccggcccccggatctgcggagccagccggagctccgccggccgtcacccccggcaaggagttcacgcgcacctgcaagggcctcgtcgtcgtgctcatcggaggatacgtgctgctccagctcctcccttcgtcactcctttgacttgtgtctgcgccttgcaggacaatcccctatgtatggaccgttttcactgctggttacatagagcaagtcctcccaggggccattggcagttctcttggtcttctcttttgtggaaaggacattgaaccagcatggggccgcaaggaattcttgaagttcattattttgatcaactccatctgtggcattcttgcattttgctttgctattggactctactacgtcactggaaaggagagcttccttgtcacaccactttctggtttccacggttgccttgctggctttcttgtggccttgaagcagctcttaccaaaccttgagcttcctatgtgctttttctggaaaataaaggcaaagtggatgccattctttgttgtatgtttctcaagtatcatggccttcatcgtgcctgattccattaacttcctgccaactttggtgtccgggatgtacgttagctggctttacctgaggtacttccaaaggaacccactgactggacttaagggtgatcccagtgatgacttctccttccccagtttattcccagctgccatgagaccagttacagaccctgtggccaacctgtttgataggatgttgtgtgcaaggtccagacctttggaagtagctctcccaatttcagatcctaccaaggcttcaagaagaagggagcgtggtgagagggttcttgaggaaagattggcggccgacaatgctggtgacacagaggcctcgcctcgtggccatggccatggcaccgcggaagactaagaactttctcgcgacccatcagcgcctcttataggagccatggccgcccatggctttgctccctccagcgtttatagctctgcacttttgtcttctggagatggaactattcagttcacagcgaaccaataatatgatgttcttagtttctcttttattttatttttcgcttctttgtccgcgaagatttattggttaaattgtgtactagtagtcaattgttataatacagtgaaaaggagaggagagggtggtggcatttgcagccgattatttgttactggtcaaaattctgtactagtcatatactctactcatatatagaaacaagaatggctttgtcaaaaaaaaaaaaaaaaaaaaaaaaaaccaaaaaaaaggagcaaaaaaaaaaaaaaaaaaaagcggccaa

SEQ ID NO: 5009 - DNA, 2834 bp, Zea mays
gcacgagaccattacctagaacatcctaatcgaaaaatcgttctagtggtaccaccacagcctcctgtgccctcctgccgtccgtgacgtgacgcagccgagccgcgcgcgctctccgggccggacgcctccgctcgaatcgatggacgccgaggccggcgtcgctggcgccgaccagcttccgcggaggcagtactacctgaatctactgcttttagcttaccagagctttggtgttgtttacggggacctgagcacatcgcctctctacgtgtataaaagtacgttctctggaaagctcagacactaccaagacgaggagacagtgttcggcgtactttcgctcatcttttggaccttcactctgattcctttgcttaagtatgtcaccatcgtcttgagtgctgatgataacggcgaaggtggaccattcgctctctattcgctcctttgcaggcatgcaaaactcagcttgctgccaaatcaacaagcagctgatgaggagctatcttcatactacagaaatgggttcgcgcctcgcaatggatcttcaccttggttaagaaggtttctggagaagcacaaaaaaatgaggactctgtttcttctcatagttctctgtggcgctagcatggtgattggtgatggtgtccttaccccagcaatctcagtactctcgtctatgtctggattacatgttcgagctactggtctacatcatagttctgtagttctcctttcatgcattgtgttggttggtctatttgcattgcaacaccgaggtactcagaaggttgcattcatgtttgcaccaattgtcatcatctggctgctttccattggaggaatcggtttatacaacattcttcattggaacccaaatgtatatcaagctctctctccatattatatggttaagttctttagaaagacaggtaaagatggatggattgctttaggagggatccttctttctatgacaggcagtgaggcaatgtttgctgaccttggtcactttacgagtgcatctgtcagggtggcttttattaccgtcatatacccatgccttatgctacaatatatgggtcatgctgcatttctgtcgaagaacacatttcacatgccgacaggtttttatgatactatcccagaaccagtgttttggcctgtctttgtggtggccacacttgctgctgttgttggtagccaagctgttatttcagcaacattctccattgtgaaacaatgccatgctttgggatgtttcccgcgagtgaaggttgtccacacatcgaggtggatctatgggcagatatatattccagaaataaattggattcttatggttctttgcgtcgctgtcactattgcatttcgtgatactactcttattggcaatgcctacggtattgcatgcatgactgttatgcttgttactacattcttgatggcattaatagtcatctttgtttggcaaaggaacataatattttccctagttttcctggttttctttggatccattgaagctgtatatctttcgtcatctctcatgaaggttcctcagggaggatgggtgcctcttgtgcttgcattcatattcatgtcagtcatgtacatctggcactatgggtcaaggaggaagtaccagtttgacctacagaacaaagtatcaatgagatccatcctatctctcggtccaagccttggcatagttcgggttcctggtgttggattgatttacacagagctggtcactggtgtaccctccatcttctcccattttgtcacgaatctccctgccttccatgaagttctagtctttctctgtgtgaagtcagtgccagtgccatatgtttcaccagatgagcgataccttgtgggtaggattggacctaaagaatatcggatgtaccgttgcattgttagatatggttacaaagatgtgcagagagatgatgacaattttgagaacatgttagttatgagcatcgcaaagtttattatgatggaagcagaagatgcttcttcagcaagttatgatatcgctaacgaaggaaggatggcggtcataacaaccactgatgcctctggcagcccattggccatgagggatttcgacggcctagctgactccatgtctacgaggagcagtaaatcagaaagccttcgaagtttgcaatcctcctacgagcaagaatccccgagtgtaaaccggcgccgccgtgtccgctttgaggtcccagaggaggatggcatgggtcagcaagtgaaagaagaactcacggcactagttgaagcgaaacatgctgggatcgcatacatcatggggcattcttatatcaaagccaggaggaactcaaatttcctgaagaagtttgctattgatgttggttactctttcctccgaaagaactgcagaggcccatcagtcacgctgcacattccacacattagtctgatagaagtcggcatgatctactatgtttagcttaaggcccattgccgaagctcacatgtggatacccggtcggggcaatgcttgtgctgtctgcggattgtggtgtggaaggagttcaggcttgttcgttctgggccaagtttcagcttgtagagaagaaggcagacttctttgttaatattatttttagcctaaataaaccagcacaatgttagacggtgatgtttctcatttggcatatttgcatgcatgctctgtaattttttctgcgagctatgtgatggaaatatatgcatcatctttataaactggtcagggttctactccttccgtttcaaaataatagttcctttacctcttgatttttatgtct

SEQ ID NO: 5010 - DNA, 1814 bp, Zea mays
gctccacccacccgacccattgctatcctacctgccagcgaacctgtctcgtctccttgttgcccacgtggcctcgccgtcgccgcgagctccaccttcctcagctctgccccgagcgcgatgtggcgagcgacgaggcggtctccgccgttcctgcgatggctatcgtcggacgcagcctcctctaaggcgccgcggcagcgcgtagcggcgctgtgggggaacggtgactacgggcggctggggctgggctcgctggagtcgcggtggagccccacggtttgccccttcttcctcgcccgcgccgccgacccgcccgcctccctcgcctgcggcggcgcacataccctctttctcacccagaatgggcgagtgttcgctacagggctgaacgactttgggcagctggggataggaacctctgttacacatatgctggagcctgttgaaatttctggatttcacgaaagagttgtagaagtttcagctggcaaccatcattcttgtgcagtcaccgcggatggtaagctctttgtttggggcagaaactcaggtggccagcttggccttggtaaaggggcaggtaaagtagtttctaccccaacaaaggttgattgtttgactgacctcagagtaaaaacggttgctctgggatcagagcattcaattgctgttacagaggaaggtgaagtcttgagttggggagctgctggttctggtaggctcggacatggccgtcaatctagcatcctgggattttctctgacctcaactgaatatactccaagattgatcaaaaactttgatggtatcaagattaaaaagatagctgcaggaatgttgcactcagcttgcattgatgaaaaagggatttggaagaccgaacgaagaattcagaccaaatattgttgaagagataccattttcagaagaagttgcttgtggaggttaccatacttgtgttgtaacagatagcggtgatctgtattcttggggttcaaatgaaaatggctgccttggtctgggaggtacggatatggtccgctctccggaaattttgaaaagttctctatttaaacttcctgtatctaaggtatcttgtggttggaagcacacagctgtagtttcaggtgatgacatctacacatggggttggggaggcgccaatgggacttttttcgaagagggccattcttccggtggacagctgggacatggaaacgacgtagactattttgagcctatgatggttccctttggcacgaatgcaagagccgtccatgtatcgtgtggcttcaatcatactggtgcaatttacgagtgctccgaggactttgactgacgtgccacctgcagacagcagatccgcatgtcttggagacttaggttagttatcaaattatactcgctagaagtgcatataaacagcataaataagctctgatgttggacctgcatttatgtgaagagaaatatagaacaagtgataacacccctgagagggggatgtaaattaaacagaataagggatgaactggatgcattttgtgatgcatcagagttacttgccagtgtatagcatttcttcatttattggctggttctgtattattttgccaggtactaagaaatccattgcctgatgtctcagcaggctgtttgtgtacattatgattgcttgactgcttggtgtcgatgcttgctgtgttttttgtgtgtaaataatacatgaatcagttaatcgtgcttgtacaattaaatatgtacatatatcagtgcatcacttattatatgtaagaaatttaaaaaaaaaa

SEQ ID NO: 5011 - DNA, 1113 bp, Zea mays
acaaccaccagataaagctgcaagctgcttatcttctcccgtcccataggttgctaggctcggccgtgtagagcagcaagagcacgccgcgccaagcaacaaagagggaccccgcttccatggaggtggtgggcggcgtgtcgctgaggccgtcgccagcgccggcgcgtatccggactaccctgccacccgtcgacgtaggcggacgcttccttctccgccgggtcgcggggcgccagccggcgaggcgcgcgctggtcgtggaggcccggggcggcaggggctggtcggagcggcagatgcagcagcagcgccgcgcgccgctgctgccgaaaatcgaggacgacggcaacccgcgattcgtcatcttcatccgcaccgccaatgtctacttctggtacccgctcaacatcatcacgggcggtacgacggcgaagatcatgctcgccgccaaggacaacttcctcggcaagtacatctacaaggacacgctcgccaggaacctcgccgccgtcatttacaaagacgaggacgtgatcatagacacagcgaaagagcagtaccgtgtgctcaagaccgaaaatcagtttcggtatggctacaaagttgtggagaaagggaacataaggtctgctctgacgacaagcaatgtgatcgaacttccaaagaaggacgagctcaaaaccgtggttgacaaggtgaaggacttctttggcgacgtgactgccggcgccaaagaatcctttgcgcagataacagggtctgctgtcagcaaggaggaagaggaagcagagagcaaagagaagttccgctccaagagacgaaagaagcagcggaagtcgaaggagggcctcaagacggagaaatgattcagtcagtcacacaagtaaagcaccggctgtagtttcgctatcgatgtccgagaactgttctgtaatttctccagcttccttttttttgtttgttttgtaaaaagacgtcgtgtaacttcattgcgactaacgtgtgctatgccttctcactaaatctcacaaaatgtgaaggtactccctacgttctcaatcaaaaaaaaaaaaaaaggcacgagcacgcaaatggatggagtccaagtgt

SEQ ID NO: 5012 - DNA, 3268 bp, Zea mays
cattgggtacctcgtcgccacggcccacggcatcgccaaccagtgaaatcatcctaacaaccggcacgccatcctcgccgccgccgcagcctcctgcgctccgctccactggtggtggtagggagtgcagcggatccatcccgtgtcccgatccgatcccttcgctgctagtatcgagccttgccatcgtgctcaccgaagaggacttcatcagtgaagaattgctttagcaacacttacaatataaggaaagagggttcacgttggatacaatccggtcctcccttgttgctaaatagggtaaagtttgttggcaagaggacatcctgttctgttgcaacagagccgccgcctgctaccactgaagaaccaggcatggatgtccccaaggagatattcttgaaagattacaaggcacctgattattattttgacacggtggatttacaatttcaacttggtgaagaaaagaccatagttacatctaaaatagttgtatctcctggagttgaaggcatctcagctccactagttcttcatgggcatgacctcaagctcatatcaatcaaagtcaatggcactgaattaaagggtgaagagtataaagtcaattctcgccatctgatgctttcaacacctcctgctgttgtattcaacttggaaattgtcacagaaatatatccccagctaaacacatcactggaggggctgtacaagtctactggtaacttctgcacccagtgtgaagcagaagggtttcggaagattacctactttcaggaccgcccagatgttatggcaaaatatacttgccgcattgaagctgataaaactttgtatccggttttattgtccaatgggaatcttattgagcagggagaccttgagggtggaaagcattacgcactgtgggaggatcccttcaagaaaccaagctacctgtttgctctagttgctggtcagctgggatgccgggaggattcatttgttacatgctctggccgcaacgtaacactaagaatttggactcctgcccaagatttaccaaaaacagcacatgctatgtattctcttaaagcagcaatgaaatgggatgaggaggtctttggtctggagtatgatcttgatttattcaacattgttgttgttcctgatttcaatatgggagcaatggaaaacaagagcttgaatatatttcaatctagacttgtgttggcatcaccggagactgccactgatggtgattatgctgctattttgggtgttgttggacatgagtatttccacaactggactgggaatagagtaacttgccgtgattggttccagctaaccctgaaagaaggactgaccgttttcagggatcaggagttctcttcagatcttggctgtcgtacggtaaaacgtattgctgatgtctccaaacttagaatctatcaattcccacaggacgccgggcctatggcacatcctatccgtccccattcttatatcaagatggacaacttctatactgttacggtttacgagaagggtgctgaagttgtcagaatgtacaagaccatgtttggagcatcagggttccgaaagggcatggatctttattttaaaaggcatgatgggcaagctgtcacttgtgaagacttctatgcagccatgtgtgatgcaaataatgcacaactgccaaactttttacaatggtactctcaagcaggtacgcctatagtcaaggtggcatcttcatatgatcctagttctcagacattctctttgaaacttagccaagaagtaccacccactcctggccagccggttaaggagcctatgttcatacctgttgctgttggacttgttgactctactggaaaagatatgcccctcacttccgtttacagtgatggaagtctccaaacagtctctactgatggccagccagtcttcactactgtgcttcagtttaaaaagaaagaagaagagtttatgtttaaaaacattcctgagaggccagttccttctttgttaaggggatatagtgctcctgtccgtctagattctgatctgagtgagggtgacctatttttcttgcttgccagtgactcggatgaatttaacagatgggaagctggccaagttttggcacgtaagttgatgctcagtctcgtagctgatttccagcaacagaaaacactggttctaaatccgaaatttgttgatgggattagatcaattctgcgcaacacaagcttggataaggaattcattgcgaaagcaataactttgcctggtcaaggggagattatggagattatggatatgatggaagttgcagatcctgatgcagttcatgctgtccgtaactttattaagaaggagcttgccgtgcaacttaaagatgatcttcttgcggctgtgaaaagcaacaggagttctgaggcttacacatttaaccatgatagtatggctcgccgtgcattaaaaaatacatgccttgcataccttgcgtcattgaatgagccagatttcgttgagcttgcactgcatgagtacaagtctgcgactaacatgacagagcagtttgctgcattagcagcattatcccaaaatccaggccaagttcgtgatgatgccctcttggatttctataacaagtggcagcatgaatacttggttgtaagcaagtggtttgctcttcaagctacttcagagattcctggaaatgttgcaaatgttcagaagctgctgtctcaccctgctttcgacctgaggaatcccaacaaggtgtactcactaatcgggggattctgtggctcacctgtgaacttccacgcgaaagatggttctgggtacaagttcttgggtgagatcgttttgcagcttgacaagataaaccctcaggtggcctcccgcatggtttcagcattttctcggtggaggcggtacgacaagaccagacaagctcttgctaaggcccagctggagatgatcgtgtcggccaatgggctctccgaaaacgtgttcgagattgcttcaaaaagcttggcggattagcttgggcagttccgaggaattgcgagtgggagtgcttaactgaatctctcttttgttggtaaaatgacaagtagagataataaacaggcgggccgaatttgcatgaactgataaaatataagtgtgatgatgcccgctttgtggggggctttggagcaaaaaaaaaaaaaaaaaaaaaaaaaaaaaaaaaaaaaaaaaaaaaaaaaaactcgaagagggg

SEQ ID NO: 5013 - DNA, 1081 bp, Zea mays
aggaagaacctaggactatatacacacaacagatacgaatcgaaaagcgccgaggaaagaataaacggcgagccgcccggcgggccggcgttaaacccagaagcctcctcgtcctctctctgactctctctcaccctctccctccctccctcggggtcgcggttgcttcctcgcggccgattcgtatcttccgcggcagcagggagggtacggtactcctccggccggcgggaggagaagaggagcttcgagatgggggcgtccctcgcttccgcgggcttggtgaactacccgcttgtcgcggcgctcctcgcgttcgctctcgcgcagtcctccaagttcttcaccacctggtacaaagaaggtcggtgggatgccagacaacttatagcttctggcgggatgccatcatcccactcagctacagtgacagcactttcagtggcagtgggaatccaagaaggctttcgtagtgcaacatttgcaactgcactagtctttgcatgtgtggttatgcatgatgcttttggagttcggttacatgccggaaagcaggcagaggtgctgaatcaaattgtctatgagctgccagaggaacacccattatcagagacaaagccactgcgtgaaatccttggacatactgttcctcaggtcgtggccggttgcatccttggaatcctcatggctgtcgttatgcttttggctctcgggaggtcttagtcaagtgttgttcaccctatatctcgctggtgatggctacaaagcataaaaacatgatctccccatggttctggctgtccaagtgttcgatagtacaaagttctaaccgaatttagatctggactgtaggtttcaggttgtagctcgagttggttgctgtaaatctgaaagggtcacttttaattccaaccacggtgtaatggaagctttgttatacaatcagcagcggtaagatcattttgcagatcagtatggtcgataccatgccgtcgcatttgctttaaaaaaaaaaaataaaaatcagcaagcctttttgcctcttccagaaaaaaaagaaaaaaaaaaaaaaaaagcggcc

SEQ ID NO: 5014 - DNA, 2001 bp, Zea mays
gcacgagaccattacctagaacatcctaatcgaaaaacttccgtccgttcccccgaactctctctcctcctcggccacctcccatccccgttccttccctccatctcatcatcaccgccgccagcgccaaaaccctacccacccacccaccgatggcctccccggcgccggcctcccccgcggccgcggcggcgcactgccccccgccgcgcatcggtctcgcgggcctcgccaccatgggccagaacctggccctgaacatcgccgagaaagggttcccgatctccgtctacaaccgcaccgccgccaaggtggactccacgctgtcccgcgcgcgggacgagggctcgctgccggtgctgggccaccgcgacccgcgcgggttcgtgctgtccctcgcgcgcccgcgcgccgtcgtgctgctcgtccaggccggccccgccgtcgacgccaccatccaggccctctccccctacctcgagcccggggacgccatcgtcgacggcggcaacgagtggtaccagaacacggagcgccgcatcgaggaggcggcggcgcgcggcctcctgtacctcgggatgggcgtctccggcggcgaggagggcgcgcggaacgggccctcgctcatgcccggcggcagcgccgacgcctacgccaacatcagggacatcctccagaaggccgccgcgcagacggaggacggcgcctgcgtcaccttcgtcgggcccggcggcgccggcaacttcgtcaagatggtgcacaacgggatcgagtacggcgacatgcagctcatcgccgaggcgtacgacgtgctccgcaggctcgggggcctgtccaactccgagatcgccgacgtcttcgcggagtggaacaggggggagctcgagagcttcctggtccagatcaccgccgacattttcaccgtggctgacccgttggacgggagcgggagcggcggcggggcgctggttgacaggattctggacaagactgggatgaaggggaccgggaaatggaccgtgcagcaggcggcggagcttgcggtggcagcgcccacgattgccgcgtcgctggacgggaggtacctctcagggttgaaggacgaacgggtcgcagccgctggggtgctggaggaagaggggatgccggcaggcctgttggagacggttaatgtcgacaagaaggtgctggtggatagggtcaggcaagcgctctacgcctccaagatttgcagctatgcgcagggaatgaatctgctgcgagccaagagcgtggagaagggatggaaccttaacctcgcagagcttgccaggatctggaagggcggctgcattatccgtgcgaggttccttgataggatcaagagcgcgtacgacaggaatcctgagctcgccaatttgattgttgacagagagtttgcaagggagatggtgcagcggcagaacgcgtggaggtgggttgtggcacgcgcggtggaggctggcattagcacgccaggaatgactgctagcctttcgtacttcgatacctacagatcaagtcgattgcctgcaaatctgatccaagcgcagagggatctgtttggtgcacacacctatgagcgcattgactgtccgggttcattccacaccgaatggaccaagctggcgaggaggagcaatggcgcagccatttgaggaattggttggtatgagaagggatgttttctgctttgggtgatttctctctgtgggttatcttttgttttactattgttatctttatgcttctagatccaagtcgagtacttcaaataatgctgtactgtatggttggcaagtgaagaacattgtgtagcttcagttttactgtgatgtaggtacacacagtttgattctcttaattttggtatgcaattgctatgatgcctctcaaaccacaatgttgtgtgtttaaagagttatctgaaatgtgttgaaattgctactaagaatactgagttttgcctcaaaaaccaacccc

SEQ ID NO: 5015 - DNA, 2901 bp, Zea mays
ccccgacccatcagtagagggcggcggctgcctcctcttcctacccgcgtccgagctcgcccccttcctcgccaccttgggaggcgacgagcatcaccaggacaccaggttgcctatattttcttccccttcttgaaaatggatcatagttctgacgaagatacagaaatcagtgattctgagattgatgattatgaaggaaaaatttatgcaagactgatgtcaggagatttaaaattaaataagaatggagaaaattacatttgtcccttctgtagcagcaagaagaagaattacagtaaaagtagcctggttcaacatgcctcaggagtcagtgcagcacctaatcgggaggcaaaagaaaaagcagtccatcgcgccctcttcaaatatttgaagaatggtcttgctaaatcacctgaaccagggtcacatgcaactcctgtggagccacaacctcttcagaaccgagacgagaagtttgtgtggccctggatgggtgtcctagttaatgtgcctactgaatggaaggatgggcgccaaattggagaaagtggaaatcgtctgaaggagcaactatcacacttttgcccactgagggtcatcccgttatggacttttagaggtcatacaggaaatgctattgttgagtttggaaaggactggaatggtttcagaaatgcgcgtacctttgaaagtcactttgcggcaggaggattcggtaagaaggactggattggaaaaaagaatcaaggatccgagctctatggatggcttgcgcgggctgaagattacaattctccaggaataatagcggaccacttgagaaaaaatggcgacttgaaatctgtcaatgatcttgcaaaggaaggagcgcgtaaaaatgacaggcttgttgctaatttagctaaccaaattgaggtgaaaaataggtatttacaggaactagaatgcaaatacagtgagacaactgcatcacttgagaagatgatggggcaaagggaacaacttctccagtcatacaatgaagaaattagcaagatgcagcagctagctcgcaggcattctcagaagatcattgatgagaatcaaaagttgcgttctgaccttgaggcaaaaatgaatgatcttgatgtgagatccaagcaactcgatgagattgcagcaaaaagcgattatgacagaaggagccttgagcaggagaagcaaaagaatgctatcaaatcgagtcatcttaaattggcaacattagagcagcagaaagctgatgagaatgtgctgaagcttgtggaagaacaaaaaagggagaaacatgctgcgttaaagaagattctgatgttggaacaacaattggatgcaaaacaaaagcttgaattagaaatacagcagttgaagggcaaactaaaagtgatggagcatatgccaggtgatgaagattcagcgtcaaagaataaaattaatgagctgagtgaggcattgcaagaaaagatagatgaactggatggaatggagtcacttaaccaaactctggttatcaaagaaagcaaaagcaacattgaactgcaagaagctcgcaaagagctagaaaatggcctgcttgatctttcaggtgggcagacacatataggaatcaagagaatgggagagcttgatctaaaagcattttcaaaggcatgccaaaaggagcgtacagaaaatgcagaagttactgctgcctttctttgttcaaagtgggaggctgaaataaaaaatcctgactggcacccttttagggtcgtcacaattgatggaaaggagatggcaataatcgaggatgatgcaaagcttcgagcactcaaagaagaacatggagaagaaatctatgcaatggtgacaaaggcgctgcttgaaaccaacgagtacaaatcaaaaggcagctaccctgtgggggagctatggaacttcaaagaaaaccggaaggtgactctgaaggaagctgtccagtttgtcctgagacagtggcgaacaaacaggaggaagcgataagctctcggccacccaatgctcttggctttttttcccaccacctggtccgaaagccatgagttcgagagctagtaacctggaaacagtagtattaattcgtgataaaatcaacagggcgatacagccctgtggatctgttccttgttggatataagctggcactcctattgcagtgtcagcatcagtggactcgaacgccattatggcgttatccttgtgccacctttgtaacaagtagttcgttcttgttcttgaaccgtgtgttgtagttggcccttggccgcatgctaccggctctgtacggctgtgcctacaaagttgcggtggaacatgcagactcataataaagcatgcttgggctcttgtgataaaaaaaaaaaaaaaaaaaaaaaaaaaaaaaaaaaaaaaaaaaaaaaaaaaaaaaaaaaaaaactttcctttcgttcgcgtccgaacaaatcccgtgctccccggggggaaaaccctccccacctccggcggcggcggcggccctggcaaccgggtgtcttctccggcgagtctcccccctagaaacaaaaaaatatggatgtccctgttgatgaccctggggaaaacctcactggaagtcctagtacccttggcaatgaggaaaaagccactacttatgctaatgtgcaagatcagcccaaggaaaaaccaaaaaagctttacgaggaacccaaagacccaatgcaagacgagttgggtaaccaaggccatgtgaccataaacaatgaaaatgtgggaggccaaaacaaaggggaccaagctacccccacagagcacggcaaggaagctggggtgaaccaccatgatgctacagttcctgatgacaaaaaatggcctgggtggcct

SEQ ID NO: 5016 - DNA, 1820 bp, Zea mays
ggcccaaatactgaacccacaacccgaaaccagcaggcaacaaagcaaccagaggcagagcgttcttcttccccgacggcccggggcccgggccgacggctcgactccactagtcgctggaaccctctgcaacaaagccgcctccacctgaccacctcccttgagctcttccccttcctcgtgggttgtgcgagccctctaccggcgcgcagtacaggggctgattgggtgatcaaacccgcaagatttgggtttgtgatttgggagcaggaggcggtggcaatatggaatataaggcgagatctactggaacttcaggaacttcgtctaaaagtttccgtgatctgtacaatatgaagtactcgagctacttaaacgacgaaccaatgccggatgctacatcggaaaaggagcagggaaatgagtatttcaaacagaagaagttcactgatgctattgaatgctactccagaagtattgggctgtctcctacagcagtcacatttgcaaatagagctatggcatatcttaaactaagaagattcaaggaggcagaggacgattgcactgaagctctgaatctggatgatcgctatattaaagcatactcacgccgaattactgcacgaaaagaacttgggaagcttaaggaggcaatggatgatgctgaatttgctatcagtcttgatccaaacaattcagagctaaggaagcagtattctgagataaaagctttgcacatggagaaaatggctaaaaaggttccagtgccagctaaacgtgcagtttctggaattgataaaactgcagatgtcacttctcacccaccgactatctcccagaaggacactattatggaagttgatctgcctgttagagatgcaatgaagatcaaagagagtgcaagcgtcaagtctaacggaggatctggagtaatcatcaatggcaataacgtgcagcagctccaaggtcgagatgccaaccagaagactgggccagaagtttcagtccaagatcttgcagctcgtgctgcttcacggtatatggccggcactgtgaaaagcattaagacacccaaaacagcttatgactttgaggtttcttggagagctctttctgatgacactgcccagcaaatacagttactaaagtcgattccaccagcaagcctaccagagattttcaagaacgcactttctgcaccttttcttattgacatcgtgaagtgtgcagcctcaattttccgggatgcggaggcattagctgtcagtattttggataatttggctcgagttccacgcttcgacttgataatcatgtgcctttcatccatgcacaaatttgaactgaggaagatatgggatcaagtattccttgctgaaaaagcgctggctgatgatcagatggaagctctgaggcagctgcgaggcagatacattccgggaggatggcaggatagcatgctcacttcgagttaaatcaatcaatcaaatgacgacgatgtaaagcaggattgttacaaaaaccttttgctggcttcgcaactgatgtctctgcatccatctgttctagaatcaggagtgcctgtcgattgttaagcccactggtctggatgtagcgaacggttgaagcatccagtgtaggaacatgtgtcgactgcaaatggttgagatccgttctgttgtgcttgccgctactgtaacctcgctttgttgtgcgccggattcctgacgctggcacatcgtacgcttgtcggcgacaactttatggaacacacacattttgatgatttaaaaattcaaaaaaaaaaccccgcgcat

SEQ ID NO: 5017 - DNA, 913 bp, Zea mays
ccgccacgcccccgcggggcgggccctgattcacgtggagcgagtgctgctcctgctcggcatcggctgctctgctgccgtggcccgtgcgtgggatttagctcaggaacccacgcctgacatcccctcttcctccccggccggcgatgtcgtcttcgtcttccgcgctggccaaaggcaagtcggcaatcggatccgcagccggatctgccaaattcgaggccaaggggaaattctcctcctcctcctccccagctgcggcagctaccaagcgtggaaccaccaccagcagcagcagaggtagaggtagagggaaggccgacaagaaggtctactccttgcccggccagaagttcgatcctccggaggagagggagcctctcaggattttctacgagtcactgtccaagcagatcccctccagtgagatggctgaattctggttgatggagcatggtatgttgtctcctgagagagcaaggaaggcatatgaaaggaagcaaaagcggcagcagcaagtgaggatgggtaccccaatcaagtcttgtgcagtgagaaaagataataaacctgaaagttccaagaagccaggcattatggattccaaggcaaagagaagagttgattacagtgacgacgacgacgatgacttcattgtgaaaatgaagagatccaggggatgacatttacttgtaatttttttattaattatatcaagtacagataccaaaaagacatgctttatataagctagggtcctaattaattaaaccctgcaactgtacccgcatgcatcttgaatagatatactgaggtttgcaagtttatgctgttgaattgaattgtaatactatgtatgtgcagaatttaatttgtctacaaatgtatctgctaggccaaaaaaaaaaaaaaa

SEQ ID NO: 5018 - DNA, 2134 bp, Zea mays
agggttttgttacggtgagtgataagtgtgtctgtcgatctgtcggtgcattgcattgcattacattacagcaagctaggttggcctttaaatagagatccatatacaccgtctcctatacccacgcgccccccgacgcgtgggtcttcttcttgtcagtaggtgtggcctgcacagctagcgccactgcccactgtaccgccattattttgttagcatggccccgagtaacatcgtcgttcagagcagcagcactccgccggttgccggcggcgacgaggagttcgcgccgtctgtatggggagatttcttcgtcacctatgcccctcccgtctcacaggcatcagagcagcggatgagtgagagagcggagctgctcaaggcgcaagtatgtcaggcgttcgatgctgccagcatggatgttgcaggtctggtcacgtacgtcgacaccctcgaacgcctcggcttagacaaccacttccgcgacctcatcggagctgccctggaacgaatcggagctgaggagctgccggagcacggcggcggcctgcacatcgtcgcgcttcggtttcgcctgctccggcagcatgggatatgggtatctacagatgtgttcgacgcgttcagagaggacgcgggcggtttctgctcgagcctctgcagtgacgaccctaggggtctcctgagcttgtacaatgcggctcacatggcagtacccggcgaggtggtcctcgacgacgccatcgccttcgcgaggggccgcctcctggacatcatcagcaaaggcgaggtcaggtcaccggtgtcagagcagatcacacgagccctcgacatccccctcccacgatttacgaggcggctggaaaccatgcactatattgccgagtatgagcatgaagaggcacacgacggcctgctgcttgagctcgctaggctcaactttgtccttgtgagagcgcttcacctcagggagctgaaggacctgtcactatggtggagggagctctacaacactgtgaagctcccgtacgctcgggaccgtatggtggagatctacttttggacctgtggtatgcttcatgaggaggagtactccctggcacggatgttcttcgccaagacgttcgggatggtgtcactgatggacgacactttcgatgtccatgctactctagacgagtgtcacaagctcaaagaagctatgcagagatgggatgaaagtgaggtctccattctacccgagtatctacgcttgctgtatatcaaaacacttagcaacttcaaagagtttgaggagatcttggaaccgaacaagaagtaccgcatggcttacacaaaagaggcatacaagttgtgctccaaaaactacctaaaggaagccatctggtctaaccagaaataccagccaagcttcaaggagcatgaggagctatcaatcatgacctcaggcttgccgatgctcacgatcctaacactaatgggcttcggtgacgaggcaaccccggaggcgttcgaatgggtaagcagtgttcctgaaatggtccgcgctggttcgcaggtcactcgcttcctcaacgatttgtcttcttacaagttgggaaagaacaagaaagatatgcctggctctgtggagacctacatggtagagaatggcttaacaggagatgaggctgcagcggcaatcgcggcacttctagagaacaggtggagaatactaaaccaaacaaggatggagatagatcacacgctactgccagcggcgcaggtggtgctcaacatggcgagggcaaatgagatcatttacctccacggcagagacgcctacaccttcggtgctgacctcaaggaccttgtcaccacactcttcctcaagcaagtgctccctctctagacaatactctgatcacacaaccagattggctataacgattctcgtgttgtattacgctttgtgtttcattatgcacgctatatatatgatcaatgtacctgtttctatcatattgatggtaatataatattctaaatggatatagttaacttaaaaaaaaaaaaaaaactcggccctatccagcgactaataaaaagaaacagaggaagtattctaaatggatatagttaacttactgtgctc

SEQ ID NO: 5019 - DNA, 4797 bp, Zea mays
  misc_feature (2212)..(2212): n is a, c, g, or t
aaggtcgaatctttttcactcatacatttcttggctttttgttaagataagtgtaatatttattattattaatttaatatctgatgtgaatcatatgtttactccgatattaaatttattttatgaatatcaaatatgattatattgcgacggatattgtactagtgttttttctaattggagtcactccgttttagttactttgtaaccaaacaacaacaaaactgggacagaacagctccgttctacttggctcttcaaccaaacactacctaagagtttcatcaacaaaatactcgctccatttcaatttatatttcgtttgactttttaaccttaggtttgactgactcgtcttattaaaaatttaataattaatattaatttttgttgtgatattgtttagtgtataatatactttaaatatggctttatttttttcaaaaattgattaggacaagtcagttagatgtattttaaaaaaagttaaataaattataatttagaacagagggagtattttgttaatccgaacaactgggtctaagttattttctgcacaaatgaaccggttgcatgggatccggatcatcggcagtcgaacagtctgacaggtcctccggcgtcgacgcgtgagagcagtcgactgccgagtatcccaatccgttgcatccgtcggtgacgggcgaactttgaatgcacgctaccaaaagaggttggaaacgctgactactcagcactggaaaaagtacactgaaaaacttgttgaagtgaaataacgacaaaaagaaaatatggagtttttcatggcggaaaggagcctgccagcctgggcgacccttttcaatagccgacacgtcgagaggagccccttgttgcagcgtgagtgcagcaggcacagggaaggggacaacgtcaagatcctgtcctctgcgtcgactgtcgagggatcggcatggcgttgagggtgtcccccgtgtcgcatggcgccgcggcagcgccgctgccgccgctcgcccggaggaggatggcccgtggggtggtggtggccatggcgtccaccatcaacaggtgagcacagcggatccctcgcctctcgctgtcttcctgaccgtgagatgcttttttgcggaaacgtgtcggttgttgggagccacaatcgttggggtaagtgatattcccgatctgcattgacttggtctgctggatcgaagcaaatcactggtgaaagttttacctttgcgattgattcgtgatctgggtggggcagagatgccacattgtttttttcctcctcccaccccctcgtttttatcgagatccacgattttggatacatttgtgactgatttgttgtcttcatctctcagttgattttttttatctatcagtcgattttttttttgtttcatctctcagtcaattgcggcggtattagtacatgcagaaagtagttggctgttgatgtctcaaacttgttcaaatctgctgatggcgattgagatgtcgtgagcttaagaaacgattggtttacatcagggattaccatcccgttttgaaatcgaattccaccaggcgccgaaaacgagattaccgtcccgtttacatcagggattaccatcccgttttgactttacattctttctaaggctctctccggcaactctatgtctcattccctattgcaccttttattttaaactccactaaacaaacaatgttatctacagcaaacaatgttttatacgtgtaatattacatcctaatttgtcaattaaacaactagattttgtcactctatttgatgatgataataaatatgttcgttttagagactatgatgtaagaatttgtcaaacttcactccaatcataacataacttatgttcaccggacgaaattaggattcatatcaattaatcacgattagtcggacgacttaagcgattaatcgtgattggtccaaaccgacttggacgattaatcgtgactaatcgctattaatcggacgagtaaacattgagcgtcacaagaacactttgaaatatagatgattatcaatagtcaaactgatgcatttgatactctgaaacagtaagaaagcaatcactacctgccatcaaacataagaagtggttactaaactgaggatgaaatgataaagatgtattgttaattgtggagtgtcgtatatttattaacatgaattttncagtgtgttggttgtgctttagttgatcaaacattgcacttggttctcctaccttagtgtagcatatatgttgcaattttaacgttagcacttaaacctaccccattagataatactccctctgtttcaaattatacggcgttttgactcttttgggtacataattttgttatgcacttagatataaatcatgtctagatacataacaaagagaatgaaactagagaagccaaaatgtcttataaatgggaacggagagagtgttcatgtttggaaaattccagtaattgcttcagatggttgctttgtttaggttaaattgtaaaagcccgaggcaagctgtctatgcaaagatcagaagcccttcctaccattgtaaataagttgtttcactctgctccatgtggcttatgaattgctaaagaaatctcttggtcactgtaacttttttcccaagaaatatatggaagtttccagtcccaggttttgtgttagataatttgtttcctaaattttctgcaagaaacaagtggaagttcccagtctatagtatagtttgttctagttttctggaagaaatatgtggaaatttacttcctgaagatttcgtggtagataggttgttgtgaattgcacacatttccttttgttttcccttatgaatggatcaccttgccaactacttcccttactctgcaatgttcattttacattttttgattacttgggtgcttttactagggtcaagactgtcaaagaaccctatactcctccacgtgaggtacatcgccaaattacccattcactaccacctcagaagcgggagattttcgattcacttcaaccttgggccaaggataacctattgaacctgctgaagccagttgaaaagtcatggcagccacaggacttcctaccagagccgtcttctgatggattttatgatgaggttaaagaactgagggaacgggcaaatgaaatacctgatgagtactttgtttgcttagttggtgatatggttactgaggaagccttaccaacctatcaaacaatgcttaacacccttgatggagtccgggatgaaactggtgcaagtccaaccacgtgggcagtttagacaagggcatggacagctgaagagaacagacatggtgacctccttaataagtacatgtaccttactggacgggttgacatgaaacaaattgagaagaccattcagtatctgattggttccggaatggtaagcgattaagtactattatatatcttcaaggattttgatatctgtttttccctttccttccatttatagcttttcaatgaatcatgaaatcaccgacatttgcttttgataatcatgtgacaactgttgtatagtaacatgcaatattttcaagtcgttcgattaatcacgattattcgtccaagtcggcttggaccaatcatgattaatcaagtcgttcaacttgaaaacactggtaacatgttgaagaattggagaaacggggaaaattaatgatgtggagtgagctgttttggataacttgtagtcataagtgtaatttatattttcatttcggattcgttccgcaatggatcctgggactgagaacaacccctacttgggtttcctctacacatcattccaagaaagggcaacatttgtgtcgcatgggaatactgcaaggcatgccaaggagtatggtgatctcaagctggcccagatatgtggcacgatagcagccgatgagaagcgccacgaaacagcctacaccaagatagtcgagaagctcttcgagatggaccctgattacacagtgcttgcgtttgctgacatgatgaggaagaagatcacgatgccagcccatctcatgtacgacggtaaggacgacaacctgttcgagcacttcagcgcggtggcgcagaggctgggcgtctacaccgccaaagactacgccgacatcctcgagttcctggtccagaggtggaaagtcgcggagctcacagggctgtctggagaagggagaagggcgcaggactttgtctgtaccttggcgccgaggatcaggcggctggatgatagagctcaagcgagggcgaagcaagcaccggttattcctttcagttgggtttatgaccgcaaggtgcagctttaatcaagaacgctaggcaatgtgggcatttactacgtatatcattttcagtcctggggttctctataagaaacagtctctaggttatctagcagggtagaattcaactactcgtggatctcactcggtgcaaagtagtgcaaagtacgctatctgttgttaccgtgcaagctgcagagtttggattactatgtgggcctggtggtggagaggaattctgtggggtgcctgcagccagttatgagtggcagctccatcgcaactgagttgttgtattgaatatgttacaggacctatagtaaccgaaagtaataatatggagtttgtatatcgacaagcttgctttggtgattgatgagaatctgaagtaataatatggagtttgcataaaaaaaaaaaaaaaaaaaaaaagggggggcccggtaccca

SEQ ID NO: 5020 - DNA, 866 bp, Zea mays
  misc_feature (854)..(854): n is a, c, g, or t
  misc_feature (856)..(856): n is a, c, g, or t
gggtacctcgaggccggccgggagcttccctagaacacagtggtgttctgatatatcgctccgccgctagggttttcagggatcccgcctcacaccgccgcaaggactcgcgacggacggagcaacggaggaagcaactacgcggcagccatggtgaacgttccgaaaaccaagaagacctactgtaagaacaaggaatgcaggaagcacaccctgcacaaggttacccagtacaagaaaggtaaggatagcctttcagctcaagggaagcgacgttatgaccgcaaacagtctggatatggtggtcagacaaagcctgttttccacaagaaggcaaaaacaacaaagaagattgtgctgaagctgcagtgccagagctgcaagcactactctcaacacccgatcaagaggtgcaagcactttgagatcggtggtgacaagaaaggcaagggaacctctctgttctaagcgtatcataaacttgctcagggtctcaagtatctgtcagaatttaccattacaaacaccctgtgcttagcttctgcatatgttcttttgtcacatctttttggtacgttgtagtttgtatgagaccaagctattgtttcgtgttattattatatttcatgaaattgtcaacatgaccgtttgcttgactgtaaacatagttctgagctttgggcaaacagtagtttaatttatcgtatccatcttgagactgttgtttgttcgaaatataatggtggaatgacgtcgttataagcgcaaaaaaaaaaaaaaaaaaagcttatcacttatcatccccatccgcacctctctccatctccctgctcctcgcctccttcttgatcagncnagccagggat

SEQ ID NO: 5021 - DNA, 1485 bp, Zea mays
ttttttttttttttagctacaacatttcccaggccaggtaaccctcatctagaacaaacaatgtcaacatttctcagccaactagggagcattcaagcccaagttggctgcttccattcgtacccacacaagatctattagacttgaacacatctggatcgactttttttttttttgtttcatcatgtataatttagcttccattcaaattctgagcatccttttcgtttcaaatatgcataaccagcatgctctccacacactgctgactgaacaagcacgacacacacacacacacacagctcgcgtggaaagggacacttccattcacatgggcttccacacgctgagcacctcctggaacatgtcgtgcatgagctcgcggtccgcgtggtggaagaagccgtgcatctcgtccctcacgtcatagatcttcccgaacacgaacaggtaggtgaggcaccctttcttcagccgctccagccggtacagccacgccacgtggagccgctccagcacgttgcccgagcctatgtcctccagcaggctctcctcgcagcagtccttgatgtcgccgatcccgtacttgtccgccgccgccagcagcggcagccggtgcttccagaactgcccctgctcgatcgtcccgtacacgaaacccagcagcgccgagcacgactccacgcacatgtcgccgatgtccaccgtcgacgactccttctccctcaggtcgtgcacgaacatgctcttgaacacgggggagcacgccgccagcaccgccttgtgcgccttcagcaccccgtccgtcgtgttgatggtcacgtccgcgtggatggagtccgccagcatgtgcgacaggcagcccagggcgctcttgctcgcgatcttctgcaccatgccttcgtttggccacaccgatgacgattccgtagcattgttcgtggctatcctcaggtctagaaactcaacatcaatcgtaaaacgcccatggggcatcgcatcgacttgccatacaaaatcatcgctggtacgcagaagatgctcgtgcacaggggagacgcaggagcgtcgcggcgggccggcccaggagacgcggagcaggaagcgcgcgagagggggctgctccttggccacccggccgggctccgggaagaggcgcacaacgatggagcggctcttctccaccgacaggtaccagttccagatgccgagcttaaaggggtccgaccggcggtaggagcaggggccgaaggtatcgatgcgccactgcgccagccgggagatggtctccacgcgggagtccggcccgcacgcacctccgggcccgccgccgctcatcgccggccacgagcagcagccactccagtccagggtgtggaggatttgacgacacaggcgaggagtcacctccacaaaaattgttccttttttccgttctatttgtgcaaaaactatttacgataagaatgtaaccgtcacttgatt

SEQ ID NO: 5022 - DNA, 1224 bp, Zea mays
actcgctacacatgcgcaccttggcacctcgcccctcgcagagtcgcagtctacagcagccgcgcaacctttgccgcgccctgcacaccggagtccaggcggcgcccggcccagccctcatgaatctggccgccttttcctccacccttgccacgctcccctggtatgagatgccatcaataaattcctccgcaactttctcgtcctcactgctccgccgctcgctctgcgcgtcgctccggacgatctcccacatggcctccgccgccgcccccacctccgcgcccgtcgccaccaccgagaacggcgccgcgaaggcgatagagcagcggcccgtgcaggtcgcagagcggctggaaaagttcaagacaacaattttcactcagatgagcatgcttgccatcaagcatggagcaataaaccttggccagggctttccgaattttgatggcccagactttgtgaaagaggccgcaattcaagctatcaatgctgggaagaatcagtacgcaagagggtttggtgtgcctgaactgaactcggctatcgctgaaaggttcctgaaggacagtggattgcaagttgaccctgacaaggaagtcactgttacatctggatgcactgaggcaatagctgcaaccatactaggtctgatcaatcctggcgacgaggtgatactgttcgccccattctacgattcatacgaggctacactgtcgatggccggtgccaacgtgaaggccattaccctccgcgctccagatttcgcggtcccgcttgaggagctggaggctgcagtctccaaggacacgaaagcgataatgataaacacgccgcacaacccaaccgggaaaatgttcaccagggaggagctcgaatccatcgccgccctctgcaaggaaaacgacgttttgctgttctcagatgaggtctatgacaagctggtgtttgaggctgaccacatatccatggcttctatcccgggcatgtacgagaggacggtgaccatgaactctctggggaagacgttctctcttacaggatggaagatcgggtgggcaatcgcgccgccgcacctgacatggggcctcaggcaggcgcactcgttcctgacgttcgccacctgcacaccgatgcaggcggcggccgcggcggctctgagggcaccggacagctactacgacgagctgaagagggactacagcgcgaagaaggctatcgtgc

SEQ ID NO: 5023 - DNA, 5121 bp, Zea mays
  misc_feature (599)..(599): n is a, c, g, or t
ctgatgccctgaacattgttccctctgtagggtactcactgttctttatttttgtgcatgttattttgttgtttactgctgctgtgagtagttatgcacacatgcatatatctgtcatcacgtttattgtgctatattttttattaaattgaatttgaaaatgcctaaattcctaacattcactaccgcgctcatctgagtaggtcactgttttgggcaatttcggttgtccattttgtgatctgtttgttttcttgggctcgtgtatactctagaagcttttccaaacattccaatcgctagctgttttttgcgtttttggtttgatcatcttcttgatttccattgaagtaaagagccaagtttagcattttggagaggtttatcccttgaacttattttgatcattttgtgtgcttcgtggtgtttactagtcatcaccgagaacatctagcctcataagaactatcattatgactagcaacaccaacataagaattcatagcacttgcaaaataattattagaattataagatatatttacaagttgtacttgtacctcgggctaattatagtagtattatggtgcaacaccttngtactccatgaacatgatcgtcttgctaaaattttgagtgataggagaaacgcgttacaaaaccacaaacaagatcataagttgtcaaaaccagatgcgatcaaacttttgggctagatgtgatggtaatggcaaccacatgaagataaatcaaagagattcagctataaagtagagctaaaacggtcttcccaaacaaagtagccaaaaagtgtgttcacgcaaagatcgatcatacactaactctgactaaattgcccgagctaccatagatcaaagaacacatgaggtaaccaacataattttacggcgaagagcggcgaggttcacaagcaaatcagcaaaagatagttatcacatttatgtggccaagaacaactagttctcgagcaaactagcagaggaaccgtcgaagctctcatacgaaagggaccttgtcaaggcaaggacatcgatggatagctataggtccatcaacaagactagggcgtcgaatcaaacgataaacaacatgaggttgaaatagattagagcaaaatgaggaatatatgtaaaaagagcgattggatgctagcttactcaatcggatatgatcatccaatatatatacatacatagagatagaaagagggagtaatcttatctattagaaaacctttccaagacgtatttttcaagtttttccatgagtttaaaacagttcatatcggaatccaaaaggtcagatccaaacatggtctttttttatatttgtcgaaagttcggacgtccatcgcaacttttgaactccgttaggacttcgggcatgggaatgatcctagacattgaaataggtttttgaaaaaaaatggatatgggtcagaattttttatgttggagtatcttttcgagagcgtaactcatttatttagactctaaatcgtatatatatttcgaccatctcaacaagcgactctgaatggtgagactcagttcatattttaataataacctcacaaaatgtttttttttacaaaatgaccaattttgtcaccgtatattgctgtctgggcaaatgcacgatgcttatctgtttccttgtgggggtagaggcagatgacaaggcgatgagcatttatccggtccggcatcacagaatggaccacggagattgcaagatgcaataactgaaagtggaccatgaatctgcgtctcattgacggatactccgatagcgaccgattctgattattggaaagtaaattcagaacggtaggtcctgatgactcgatgtggatgggcttgttgtatcattattgaactccagaagaagttttacttccccgtgaagcaaagctgatcgatgtaaattactccggcagcagtagtagtcctcttgtctttggctgcccgtctgtcttggttgactctcagtttcacgatttcatcctagacgtgcacaataaataaacttgcataaacaattcaaagtgccctgtgaatgactcggttaattttccttgggcagttgagcacttgagcatgagctgaagggcacaagaacgttgacaagctcgaatctcgaagctgtagattcaagaaaaccgaacccaaccaaccgccagccttgacccacgcgacgcgatccccgagctcacgccgtggcagcgcatgcatgcacgagggtccaagtcatcgccggcgccctggcccacccatcgcccatccaacggccgcccgcgtcgcgacggacactgtcagcttccgatccgcgtggcacgagaccattacctagaacatcctaatcgaaaaagggctctacttggacggggtgaggagaggcgaggagagcagagcaggcagccgacgacttccccacgcggaggcgttgcttcccggtcgtccaacgcctggcatcccttccttctcctcacccagcagcagccggtcggcctcggctagatctcgccggccgcctccaattggttgtccactgtggccgggccgaggggtacttatctataggcccgcagatctgcgcctgcgcccgtgggaatctccgcacctcgctatccgtctcttggatagatcgatcttccgtcgctggttccccttcgccccacacgagtacttccaaggaactggaacttccagccggcacggggattcgagcttctgctctatcagcaactccactgggcgctgagggtctgtagcagagcggtgcgatcggggcagaagggagccatgatgagggggcaggcgtggctggcgctgctggtcgtggtggcgctggccttggcggacgcggcggcggggaggttcgtggtggagaagaacagcctcgaggtgacctcccccgacgagctcaagggcaagtacgagtgcgccatcggcaacttcggggtgccgcagtacgggggcaccctgcacggatgggtcgagtaccccaagtccaaccggaaggcgtgccagagcttcgaccagttcgacatctcgttcaagcccaagcaggctgggggacgacccatcttcgtcctcgtcgaccgcggagaatgtttcttcacaaccaaggcatggaatgcacaaaatgctggagctgctgcagttcttgttgtggatgacaagtcggaacctctaatcacaatggacaacccagaagaaggcaaagagcacctagaaaacatcactattccctcagtgcttataacaaagaaattgggggaaaaccttaagaaatccgcggaaaatggcgatatgctcagcgttcttctggactggagagaatcccttccccatcccgatgagcgtgtagagtatgagttctggacaaacagtaatgatgaatgtggtcctaaatgtgatatgcaaatggacttcgtgaggagctttagaggaactgcacaaattcttgagaaaaagggttacactcagtttactcctcattatatcacatggtattgtccagaagcttttgttgatagcaagcaatgcaaatcacagtgcatcaatcatgggagatattgtgcaccagacccagatcaggattttagccaagggtatgatggaagaaatgttgtggttcaaaacctacatcagatttgtgtattcaagattgctaatgagactggaaagccatggctgtggtgggattatgtgcatgatttcgcacttaggtgtccaatgaaggataagaaatacaataatgactgtgcccatgatgttatcaaatcacttggattggacatcgagaatataaacaagtgtgttggagaccctgaagccgatgtggaaaatgaaattctaaaggcagaacaagatgcccaaattggtcatggtaaaaggggagatgtcacaatactaccaacccttgtcatcaacaacaagcaatatagaggtaagctggacaaagttgctgtcctgaaagcgatctgttcaggatttgaggagacaactgaacctgctatttgtttgagcgaagagattcaaacaaatgagtgtttggagaacaatgggggttgctggctggacaaagctaataatgttactgcatgcaaggataccttccgcgggcgtgtttgtgagtgccctattgtgagaggtgtaaaatttgttggtgatggatatacccattgtgaagcttccggtgttggtaggtgtgagatcagtaatggagggtgctggcaggaaactaaagatgggaaaacaatctctgcctgctcaaacgaaatatctgaaggttgtaaatgtccaatgggtttcaagggtgatggagaaaaaagttgtgaagacattgatgaatgccaagagaaactttattgtcagtgcaagggttgcagctgcaagaatacgtggggaagctatgaatgcagctgtggtgatgacaatatgctatacatgagagagcatgacacttgcatcagcaaagagggaactgccactactgttggctggagcttcctctgggttattttctttggacttgtttttgccggggttggagcatacgctgtgtacaaatacaggctgcggagttacatggattcagagatccgtgccatcatggctcagtacatgcctctggataaccaagaaggagcaaaccagcatcaggtcgtgcacgccaatgatatctgaagctgcactccttttctgaagcagaaatagagggggcgtgcaacatttcacttgtgctgctgcatcattgggtcatgggttttacaggtataggtcaactaggctcaaagatacacaggttatgcgagatcaagatctactgtaccatgaattaagatttaagagagagacgttgtgcgcctcttgttacgacacttgatgaacagcatagggaatgataccatcatagttttagtagtccttcgttgccttcagtttgtcttcaaagagttcttgttgcctcttcacatacatgtaaacactgtaaataccgttacctgaataaagcttcagcctgctaggctacaagcagggttcactgtacgtgtccgaacatgtgatttattacaaaaatctttcaaaaaaa

SEQ ID NO: 5024 - DNA, 1755 bp, Zea mays
aattttggcgtgctttacttccgcttccaatataccttttttctgcgacaaaaatcatttttgttaattgcgaaaaggaaagagcccgtgtgaacaggaggggtgaggagaagagggggaaaagagagagaaatcggagggcattagcaagaaaccatgagttctaggttcgcaatccctagtcgtcttgtcctgatcttacttgagtgctcgtgagctctttccagtggctaaagactgcagatttgagttctggcccaagaaccgcgtgctagcccgccatggaggtgaggtccgagcaagggctgatggcggggagggatctattcggcatgccgaagagcccgccggcgcccgcgccgccgtcgtccgccgccatgcagagcgtgcgcatggcgtacaccgcggacggcaccgccgtgttcgctccggtgagctcttcgcctgcgacgccgtcttaccagccgcagggcgcagcccacggcgctagcatgtccgcggcgacggtcgttggaggcaatggcgctccagctgcgccgagcatgggtgagccgctggccaagaagaagcgcggacgaccaaggaagtacgggcccgacgggtccatggcgctggcaatggtgcctgcttcggcggcttcagggtcgccggcgacagggcagggtttttctgggccgttctcaccgcctgcgttaaatccggcgagctctctggtggtggcgtcgccagacggattcaagaagcggggccggcctaagggttctaccaacaggccacgcgtggacgctgctgggtcatcaggagctggatttacacctcatgttatcacagttcaagctggggaggacgtggcatcaaagattatgtcattttcccagcatggaacacacggagtttgtgttctttcagcaaatggctccatatcaaatgtaacgcttcgtcagactgctacatcaggcagaactgtaacatacgagggtcaattcgagatactgtcgctgtcggggtcattcttcctggctgaggatggtgtccagcgcagccgaaacggaggcctcagcgtgtcgctggctggtcctgatggccgtctgttgggtggtggggtcgcaggacttctagtagcggcttcaccggttcagatagtactgggaagcttcaattctggaggcggaaaggagccacaaaagcaggctccttcagaacctacatcggctccaccgagggttgctccgacagctgggatgggaggacccagcagcccttcttcaagaggcacattgagcgagtcatccggtggcgctggaagcccaccgccactgcatcgagccatggctgctagtgctagcaatagtaaccagccaccgttcttgtccagcatgccttggagatgagtttgcagcttgcattctcttggccaattccaggcaggatgtagcaatctgcgctttcagtagcgcccgttgtgtgagtagctgtgtgcagtacaagccagaagcttgggtgggaatagaattgcgtctggtaaatctgtagctctgttgtaggttccaccctgaattcctgtgctaggtgtgttgagctgtgtaagcaatgtaatcctttcagcgttatcaaatgctatttagttaaatgtttctaccaaggcatgtcgatttgaatcataagatatcaatttgctgtttgcgtctcggacaacttctgttctagagaacgttctactcactgaaatttgagcctgttgccaagtttgaaaac

SEQ ID NO: 5025 - DNA, 6067 bp, Zea mays
  misc_feature (2557)..(2557): n is a, c, g, or t
  misc_feature (3067)..(3067): n is a, c, g, or t
gctcgtgttgtcggtcctgcattgtttgtatgggagtgatgccctcatcatcctcccccacttgaattagagtcatcctcgactcaggcggtggccaagggggtggccgagcaaccctaggatgtacaaagcctttaggcccaaaaacatgcgtcgctgatttctagcagattctggatatcactttgttacaatgattctgataagccttgagattattttgatgtgggatcaattgatttggaaagcttatatccttagctttccaacgatgtctagaatgtctaaaatatggtctatatgtggcctgggcgttcatttttgtgaggaccactcctgcaacccaaactggattcgtgaataaactggatttcaactccccttgagtttggaactctattattgattgggcctttaccatatagttgacgcccatgtactcatcacaagtggtcaccaagctaggaagggtttacagagttacacaaataatctttggtaatgcatacatgttgcagacattgcaaggtgatgagttacctaagacattgaatggtcgtttcctagaagcaatatcatcctagtgtatgacaagatgcttaggaaactgatgctcgcacatcaagttgctaatggcttgtactagatgcttttggttcgctgatctttcctaaaggcaaggcatgtgttgaccaccatatgtggcacctggagatgtcggacggttcggccatgtggcctggacggtccgtgccccggatagtccgcgaggtagctcggatggtcctcgatcagattaacttaggcgagaaaacccatgtttccatgcgtgcttagccatataatcatgtgggtttatttggggaacgcctaggaatgagtcccgacctccactatatatatatatgaagtggtacgacttattggcgtataacacaatcgatccaaaccaatacaatctactttatttgcttcgttcttcatcattctaggagtaggagtaatttaggtctagattagcctttcccaaccccaaatcttcatctctatccgactctatgttgtatatggacgtcccgggcagcctaccgaccttaggcaccctctggaactctcctccatgacggggtccctcgcaaggggcgagttctagggttttctgaggaggaaatgactctgtgccatcgcggaccgtccaaagcagcgcagagaggagacactcctgcagcaaggtcatggaccgtccgatccttggccgtggaccgtccgtgttttcgcagagagcaccgcttgacggttcacctctagtgtttggccccaatcggaaccaacacattatttattaacttctccacgtcgttgaagcagggataaagattcaacaaggaacatttcctcgatgttagagatggaaaatgttaggtggtgagtctacttagatagtgataggacgcgaatcatcgtgagtccataccgtggagaatattttttagagaaatgctcttgtggagaaggctaagaagtaggggtggatacgacctggctcaactcgttaagtaactgaaccagagaattagctcgatttggctcgtttgcaagcttgagctgactcgtttagctcgcgaggtacaacaaaaaataatatgcatatccatataacaataaaatcatttgctagttaattccaaaccaattaaacaccagaaaagagtaataatgcttaaaattttatataccaagtctttcaataccaaattaataatgttcgtcgcttattagttcatccaacacaagtgtaggttttgttttgccgataaatgctagctcattcgaaccaacgagcttggctcgagctcgactcgagctggctcgtaaataaaccgagctgagatgctagctcagctcatgataaaattgaaacgagtcgagtcaaaccgagctgaccacgagtcgagcgagctaacgagccacgagtattttgtccagccctaccaagaagattggtttagtgatccaatccatgatgctaacaaaataaatagggtagattagaataaggttcaaatgatttcatattttctttggattttgaccgtggcttttgtcccccacaagttcaatcaaagagtcaatccaatcaacaacttttttcaaaaactgacttctcacaatgcaaaattgaaataacatctagacctacttttagtagtttttcggatggaagaactctgtaaatatacatttaaaatttttagtggcttgtaacggctttcaccaaacgacttttagcttttttacagctcataattcacaataaatttttcacaactcataattcataaccacctttttatagtcatagttcaaccaaacagacctcaaacacatcatgaattcctcattaccgtcctaggtgtgacacttctagttttaggccttctaaagccgtgctcagtagcgtgcatatattcatataaaacacaacactgttttatgttgtagtctgtattatttatatagtgaaatttaaaatagagaatgtgataataggtgaganaagaaggttattagagataacctgaacatttaggcccgcattggcctgctgctgagttttgatcgatgagttgtgggcgcacctgggacagaataccctatctcggtctgcccatgtgaaaaaaacagaaaagcaagcagcccaatcagccccaccaagaaaagccgaagcccaagaagcccagtgagcaccttctccactaggttagtctttagtacacggtcagccgcccgagccgggtcggagttgagcacttccccttctcctacccttcacctcccgtttgcccgcagccgccaccgcgtccccaagcactccagcgcccccgtccccgatcgacgccatggtgtcggaggccagcaagaagaaggccgcccagaagaaggccgctgccgccgcaaagaggggaggcaaggcctcggtggcgtcctcgtcgtcttcatctgcggccgcggccgccgataaggtggcgaacggcgtcgtggcgcttaagctatcagaccgcacctncaccggggtcctcgcatctcaccccctttcccgggatatccacgtgagcactcatttccgatcgaaccctcgtcttcctattctttcgtgattcgtggtgtgaatcttttacactcccgaacttaccctggacgcggaggacctagcagttaaacagtttattttttccccatactacgccacgtcagatttaggacgtttggagtcgctgcttccatcgatctccagagatctcttctgctctgttccacagcaaaccgatctctggttttgatatgcgcactgacctttgttctctgaattagattattgtttattttattagatatcgttgccccaagagggagctcaccagtccccccccccccccaacgggtggaaaattagaattatgtgttgtttgtgaataaagataggcatataaagggacaaaattaacgaatctctctgataatccagtatcattgaatattatgctatatatctgaaagcagaggtcagaaaaaatcaatcgataacgtttctctcgtggatatcttgcttttactttttttaatttggctggaacttctgctcgcactttttaactcttcctgcctctagcacaatctctatatcctgtcgcaagtactacatataccattgatcattgccttcaatgcatcgtggtccaaaataaatggatctatgtgcatcattgaaattcaacgaccatgtgaatggtagtcagttggcagatataacttggagcagactgccttgctaacagttccatgtgaagttcaagtttggattctgtgtagattgttactatgaaatacaggcagtagcttttttcatataactttttcctggcacttccttttgccattataatgaagtgagaaagaggtctttggcctcttttaaatttgaactcttgtttctatttttgggtgctgcgtctcctgttaatttgtttagccctttgctgattagtgatttcttagttccctagtaatatatgttttggatgttgcagatagagtctctttctttaacattccatggacacgaccttattgtggattctgatttggagctgaactacggaaggtaaacacataaatacataatgctaccattcagttacgagctggtatgctcttggagcatgtcacttgtaccttttatctgttatatttttatttgatatatcaggcgatacggtttgcttgggttgaatggctgtggaaaatctactcttctcacagcaataggctgcagagaacttcctatccctgaacacatggacatataccatctaagccatgagattgaagcttctgacatgtctgcactgcaagccattgttagttgtgacgaagaaagagtgaagttggaaaaggaagctgaaattttggctgcacaggatgatggtggtggtgaagcattggagcgtgtttatgagcgtctagatgcaatggatgctggaactgcagaaaagcgagctgctgaaattttatttggtctgggttttgacaaacaaatgcaagcaaagaaaactaaagatttctctggaggttggcgtatgaggattgctttagcaagagcactgtttatgaatccaacaatccttttgcttgatgagcccacaaaccatctagatcttgaggcttgtgtctggttggaagagacactgaagaaatttgaccgcatacttgttgtcatatcacactcccaagattttctaaatggagtgtgtactaacattatccatatgcaaaacaagaagctcaagttatacaccggtaactacgatcagtatgttcaaactcgctccgatcttgaagagaatcaaatgaagcagtacaaatgggagcaggaacagattgcttcaatgaaggagtacattgctcgcttcggtcatggttctgcaaagcttgctcgtcaggctcagagcaaagagaaaactcttgcaaagatggagcgaggtggtctcaccgagaaggttgttagggacagagttctagtgttcaggtttacagatgtaggcaaacttcctccacctgtgctgcagtttgttgaagtcaagtttgggtatacaccagataatctcatatacaagagtcttgactttggtgttgatcttgactctagaatcgcattggttggtcccaatggtgcagggaagagcactcttctgaagcttatgactggtgaccttgctccattagatggcatggttcggcgccacaatcacctgcgcattgcacagtaccatcagcatcttgcggacaagctggatctggacatgccggctctggcttacatgatgaaggaataccctgggaccgaagaagagaagatgcgagctgctgttggcaggtttggcctatcaggaaaggcgcaggtgatgccaatgaggaatctttctgatgggcaaaggagccgtgtcatctttgcatggttggcatataggcagccgcaactgctactgctcgatgagccgacaaatcatttggacattgagaccattgactccctggcggaggcactgaatgagtgggatggtggtttggtcttggtgagccatgatttcaggctgatcaaccaggttgctcaaaagatttgggtgtgtgagaatcaggcggtgacaaggtgggaaggtgatatcatggatttcaaggcacacttgaagagcaaggctggtttatctgattagagggctttttccagcaaccatgagctttttaactctgtatcacgaagtcccagttttccaatagcgaactatcagagttactttattgtatcggatttcttttgacttgcattgcaacctgattaccttatactacctggaatatttatttatatatcttttgaaatgctattatgtgtaaagttaagtttcgtacccggtgacccctttgatttgtcaaagttactagattctatgatcattgtgaacatacaacttaaatttagttttcaattcaactgattttatttcttcag

SEQ ID NO: 5026 - DNA, 1975 bp, Zea mays
gcacgaggcattaaccgcgctccccacacgccctaaccattcccggctcccggcagagacggccgctcgcctccagaagagcaacccaagtcgccgagagtgactcccacacgacccacctaccccgccgccgccgccgccgcatccccctcgattccgtctggcgatcgggggctcccagacacatcacagatacaccacgccaagccaaatcgagcaacgtctatcatcatattataatttcccctcattcatctcacagtcccaggcctcccctccctcctcccccgtcgccaaccaacctccaacccccagccgatcgcgtcggagatgctgggcgtcgcgcggaggcggctcggatccggatgcgtgctcgcccagctggcgcaggccctccgccccgccgccgctcccgccaggacctactccgccgcggccaaggagataactgtacgggaagcattgaataccgcattagatgaagaaatgtcggcagacccttctgttttcttgatgggagaagaggttggcgagtaccaaggtgcatacaagatatccaagggtttgcttgacaagtatggccccgatagggttctcgatactccgatcactgaggcgggcttcactggcattggtgttggtgccgcttaccatggtcttcgacctattgtagagttcatgacatttaacttttcgatgcaggcaattgatcacataattaattcagctgccaagtcgaactacatgtctgctgggcagatatctgttcctattgtctttaggggtccaaatggtgctgctgctggagttggtgcccaacactcacagtgctatgcagcttggtatgcacatgttcccggattgaaagttctagctccatattctgcagaagatgctcgaggtttgctgaaagcagcaatcagggatccagatcctgttgtgttccttgaaaatgaacttctttatggtgaatcatttcctgtatctgctgaggtacttgattctagcttctgccttccgattggaaaggctaagatagagcgacaagggaaagatgtcactatcactgcattctccaaaatggtgggatatgcccttcaggccgctgatatactggccaaggaaggtatcagtgccgaggtaatcaatcttcgctcaattagaccgctggatagagctactattaatgcatctgtgaggaaaaccaatagattggtaaccgtagaagaaggcttccctcaacatgggattggtgcggaaatatgcatgtctgttgtagaggacagctttgagtatcttgatgcaccagtcgagaggattgctggagctgatgtgcccatgccgtacgctgccaaccttgagaggatggctgttccacaggtcgatgacatcgtccgggcagccaagcgtgcttgctacagggcagcagtaccgatggcagcaaccgcctagtccagcagaaccctgcatgttgcatttctttgtctaattttaatgtccgtgctgcagaaagacgtgtcacataatggtgtgacgagtacccactgccgctgcaactcaactatagcatgagctgagtttttgtagagccaccgagaggtgttcagtactccagttccagttccgcttatcttcgccgccgcagccggaaggctgcgcatgactctgcgtctgttttatggttcacgaatgattgcagatttgcagcagagcctctggagatgagaattttacttgtggcgagatgttgtgagtaacttgtattcagaagggggaactctcaagagatcctcaagtcgtgattccagttgcggctttcttgatagtaacgtactccctccgttttttagttgtcgctggatagtttaattttgcattatccagtgataactaaaacaaaacggatggagtacgtatttaccatgctagtgctagaggatcttttgttcctctgcagggtgcagcagtcactgcg

SEQ ID NO: 5027 - DNA, 2018 bp, Zea mays
gcacgagaccattacctagaacatcctaattgaaaatttcttttgagaactccccttctccgccactaccgaagcccttgtacccctcaccgccgccgctgctgctagggagcttccatccgcgcgcgcctacaacgagagctagcagcggtagcggccgttatcttgtcgctccggctccgttcgtgtacccaagtcccagcctagatgccgcagatggaggggtccactgatcagatcgccgccggctggttcgctaaggagccggcttccgagcggcccgtgggcttgccgaggaccggctcttccagtcgcctcaacgcgcaggcgccggagttcgtgccgcgggggccgccgccaccggcgccggcggttgtgctgccgcctccgccgcaggtgatccgcatgttcgccgcgcctcccccgccgccgcgtgggggcttcttctccgcgccgcagccccggccgttcgagtactatgcgcctatcggtgaacgcagcggatttgctgccaaggagcaacaggcgccggagctggaagcggagatgctcccgcccgccgcggtgaagacggagcccggtggtggatgggctcgacgacgaggtggtgcacaagatcaccaagcaggtggaatactattttagtgacatcaaccttgctactacagaacatctgatgagattcattaccaaggattctgagggatttgtgccaatatcggtaattgctggctttaagaaagtaaaaacttctgtgcgcaataatgtgatgcttgctgcggctctccgaacctcatcaaaacttgttgtaagcgatgacggtaagagagtcaaaaggcagcagccatttacagaatctgatttgcaggagctccagtcccggattgttgtagcagaaaatcttcctggtgatccctcctaccagaatcttaagaagatattttcagctgttggaagtttgatttcaatccgaacttgctatcctcagactccaaatggcactggtcctgcaactaatagatcttccaagttagatatgctttttgctaacaagctgcatgctttcgtggagtacgaaactcctgaggatgctgcgaaggctattttggagctcaatgatgagaaaaactggagaaatgggcttagagttcggttgctgaatacttgcacggtgaagggggcaggcaaaggaaaaaacggaatgaatgaaactgatggaaatagtgaggaggatgtctccactttgaaccattctaacgagaaacagtttgaacaatcctctcaactgttagatgtactgccggaacacttgtttgatgagaatttcaacaaggaagttcccaagcgcggcaaagggcgcggtcgcggtggcagagggcatgggcgtggcaaccatcaatataacaatcaccatcacaataaccagcaccaccagaacaaccagccgcagtacaataaccatggcaacaaccaccttggtgggaaccgtggcagccttcactctgttggaactacaccgcataacctgataaccaagcttgagccgcatccgcacctgcctattggggccaacaagcttccaccaggcccccgcatgcctgatggcaccaggggtttcaccatgggcagggggaagccacaggctgtgctacctgggttgtgtgctgttggtgttgagtgaggcatgcagattgctgctcgtatgcttgtattgtatatctttgtggtgggagtatttgtgcgtcacactttgtggacacggcgagctgtcaaaaccagtatattacaatcgctttgtaatcgtgtatctgggcaatttggtcggttggcacggggtatgaatcaattttttttgaattcagtatctatcatagaaaaggacaagcacactaaaatgtagcgtggtgatttagtctgccctcctgttgcgtcattttgttgtcatttcctaaagcagtgacaaatagttatttttctgtcggctgttggtgacgttacgctgaagtatagggtgtgtt

SEQ ID NO: 5028 - DNA, 4954 bp, Zea mays
  misc_feature (1029)..(1029): n is a, c, g, or t
  misc_feature (2109)..(2109): n is a, c, g, or t
cccctgccacgtatgaaaatgttggcgccaaagaaggtggcgccactatatattacctcggcaccaatgatgatgacgccgaactaatggtctattttttgaaatgaaactgctaagggtatagttgtgaaaaaaaacaccaaaaaggctaaaatgcaaaaaagttggccagagaggtgtcttctgcaacacaggattttcacgagagccgcacaaaattttttacaaaaatatccagtctaaattcataggcaacaagattttaaaaacttccccacattccaaaggatcatccaatactcgggctgtatcgcgtgaacgaaattacaatattgatttgctggctgggtgaagctattgcatcgaacactataaaatcattattcagataactataaaatattctcagaaaaataaaaagttcgcaaacaagatggaaaaagaaaagaaaacaggcgtagaaagaagacaaacgagagccagccaggtgttctctcgttctccggatgactctccagtggcacatagaaaacactagtactgtcccctcccggacatcagagacagacacagtagagacgaggcagaggcttctagatctactgccagctcggcagcaacaaagccgaagcgtctcgcgtgcgcggccgccaccggggattagggatggcggcgaagaaggtgctcatgctctgcggcgactacatggaggactacgaggtctcttcctctctccccctcttctcgcgtcgcctcctgctgaattacatgtattttggatcgggaatcagccctcctgaaacaaaatcggttcttgaattgatgctgggttaggtcatggtcccgttccaagcgctgcaagcgtatggggtgtccgtggacgccgtctgccctagcaagaaggccggcgacatctgccgcaccgccgtccatcagcgggcccctctccaggtaccttggattgatatccctgtgctctctttttattttttgcgtggaagcgttccgttggttagggttagttatgcngtcttgcttctggtgagatcagttggaccaaatgaagttgtgtagaaaacttgttaggtgttcattagattgacagtgaagagtagaggcttgcataaactagttggacactgcatctgattagaaaacttgttaggtgttcattagattgacagtgaagagtggaggctttaatccataccggcttctactacttcttcagtgtttttgtcgatatgaattgtagctgcagcagtccaaacagtcgtctttaatccgaagcgaacaacactttcgcagtaaaaaaacttgtgtttacttgcctgaaagaagcaaactgtcatgatccatgactctgcagagattgaaaccaacaaggcaatcaccatggcatctcaaagcataatgccaaagtatatacagacaaactactcgtgcataaatgcatcatacagagatttgtttcattgcaggcacaaattgatcaatgaatatcatgttgttagtaaggaaactaatactccctccgtcccaaaatggtatttgttttagggtattaatggattcatacaatatttgatgcatgtgtattatatttgtgtctagattcattgttattcatttcaatatggacaaaaaaagataggaattctcaatgtaaatagaaataatagatgtatgagtacaaatgtgtttaattgagtttgcttatcctgttaacaaaaagtgaactgtaaatattagtctatatgtaagcgtatgtttcaaaaatatatataactgtctctgtacagcggtgaagaggtataaagtaatcaataccacagtagcaatattaatggttgacgtagaaagaatacgtaagcctacaaatatttatccgtcggtcaaaatccattttggctttccccacccggtttccagaaagcgcgaggacacgcccgtcatggctcctacatcaacagttcagcagccgccgaatgcagatccaacggttgctatttaaaaggtgacgtggctgcgtttggttgtgcagaggctttactatgtaaataattatccttgaggccatggtggtattgtagatcaataacacttccntgtcatgcttctcttgcttacttcttgtggcatctacactgatatggtttggattaacagctgcaagaataaacattctctcattcgcatatttcatgcagacatactctgagacaaaaggccataatttcacactgaatgcttcatttgatgagattactgctagtgaatatgatggattggtaattcctggagggcgtgcaccagaataccttgcgatggatgaaaaggtgcttgacctagtcagaatgttctctggtgctaagaagcctattgcatcagtttgtcatggacagttgattttagcggcagcaagagtagtcgagaaccgtacctgcacagcatttccggctgttaaaccagttttggttgctgctggtgccaagtgggaagagcctgacacaatggcaaaatgcactgttgatggcaatctcatcacagcagcgacttataattctcatcccgaattcatcagcctatttgtcaaagcactcggaggttcagtggcaggctcagataagagaatactgttcctatgtggggtatgtattgagaaaaaaaaagatgtgtttcttaagtgtttcacattcttatacacattttaatcacacactgcacgatttggatgttgttttttttctaagacattgtgtgattaagtgttgccacattctactgacattgtttttttcttaattgcatgattaataggactacatggaggattatgaggtcatggtcccattccaggctctccaagctcttggctgccatgtcgatgccgtttgccccgacaagggagctggggagacgtgcccgacagccattcatgatttcgaaggtgaccagacctacagcgagaagcctggccacgattttactctgacagcgtcgtttggaagtgtggatgcttcgagctacgacgcgcttgtggttcctggcggacgggctccagagtacctggctctgaacgataaggtcatcagcttggtgaaggccttcgcggagagcggaaagccaatcgcgtcgatctgccacggccagcagatattatccgctgccggagtcctcaaggtatagctctatcattgtttctgcggaatcctgtttctgttggtaattcgatgtgccctttgatctgctggtgtttcttttggtccatgtgtttctactgtgtggcctagcagactttgctgtgaacataacaaaaacaaatcttgctagttttctgccgtccaggaaggatggtagtcagtgcagattaatggctgccccatctgtccgccgtcggatgatcctccttagtcattggggttattactagcaaatgtagtatctggttttctcggaacatctgacaactttggtcgactgacgtgcgctgacgctcccttggttggtcggtcgacacgcaggggaagaagtgcaccgcatacccagccgtgaagctgaacgtgttgctcggtggcgggacctggctggagcctgacccgatccaccgctgcttcaccgatggcaaccttgtgaccggcgcagcctggccaggccacccagagttcgtgtcccagctcatggcgttgctcggcgtcaaggtttccttctgaagtccaaactgaaagggcaaggcagaaagagctctggctcaacctggggaggggcgtgatagcatagctttggatttccagatagaagagaacagactcaaaacgacaccttatagcgatcgctgcacttaatccttgttccatgcgcagcaagcctcaggcttattacccttgtttgtcagcgttgtgtaaaaactgtaacccggatgctgtttcttcttcttcttcttggttccttcttttttctgagtcgtcctttgtggattcaaataataaataaagtcttgtatactgctgtttgttgatctggtactgtgcttcgagcagctagatggccaacaaagaaaatagtggctctgttatgttactgctacagtgagaaggtcggagacagaaagaatgccgcaacttggccccaccaccaggccatggcagcagtgcagcacagagcgcgaaagcgaactgactggacccgatctttgcactccctctcgcaaaagcgaggagaatctggatgcggatgggggccgtcgccgcctcgctttttcaaaaggccatcacggttgccacttggaaaacgacggcggcggccagtgggaccggaccgccccggaagcgattcagatttttttctttgtttgtttttttttttttttgtaaaaaaagcaaagaacaacaaaagctaacgaacgcagaaaaaagagggatcgaaaggaaagcgagaagacagcgcggaatggcagaaacgaagaacgaacttggcaagagcaaattcagatcagatcgcgttcacctgtcctgcgttgtgccaagcgcgatgatcgacataggattttagataatcttccgtgcctttttttttctcggtgcatgaatggcttcagacaatgtccggtcccgtgtgttccgtggatgttgggtgttggccaaatgcatgagccacaccgaaaatcggaatatatcttagctactgtcatcaacagagatggtcacatgcaacgctagtagcaagatgtgtgtaggtccatggccgtatccgtacagccgtactaggggtgtataacgacctcagctcgttaagttaacgaccacagagtcagcacgagctcgagctagcagaaaaaataatatatatatatatataataattaattttagttaattttaaactaatttaacaatagaaaataatgattatactcatagtttcacaaaccatgtcaatataacatcaaattagc

SEQ ID NO: 5029 - DNA, 1506 bp, Zea mays
tgggtacctcgaggccggccgggctcctgaacacaccacccctcgtctccccacggaggccgtcctctcctctcctctgcgtccgccactgcccaccgctcgcccgcgcgcgctccattacctcggcgggcgatggccgacctatccaacaccggctccacctaacacgagcagcgcccccgcctaggcggcagctggctggtcggtcgtcgagcagctagcggcggcagcgcccggagggaggccgtctcactctcctcgtcggggcggcaggagatggaggccatcgtgggcgtccgcgcgccgccgcgtggccgtgcctgggccggcctcgagaagccgccgcgcgccgcttgctgcgccagagtcccgacggcgaggctcgcggtcgcggcggacaggccgcggaggctggtgctgctgggcgccgatacgcggagggccgcggatcctgccctccgttgcgccgcgcaatctgcaggaacaggaaaggtccactactctgctgatgacgctctcatactacagcaaaaagcccaggatgttctgccttacttggatggccgttgcgtttatcttgttggaatgatgggttcaggcaaaactacagttgggaagatactatccgaagtgttaggttattcgttcttcgacagtgataagttggtagagaaggctgttggtatttcatctgttgctgagatctttcagctccatagcgaaacattcttcagagataatgagagtgaggtcctgagggatctgtcatcaatgcatcggttggttgttgcaaccggaggtggtgcagtgatccgaccaatcaattggagttacatgaagaaagggctgaccgtatggttagatgtcccactggatgcacttgcaagaagaatcgctgctgtaggaaccgcgtctcgaccactcttgcatcaggaatccggtgatccttatgcaaaggcttatgcaaaacttacgtcactttttgagcaaagaatggactcgtatgctaatgctgatgccagagtttcacttgaacatattgcattaaaacaaggccataatgatgtcactatacttacacctagtaccatcgccattgaggcattgctaaagatggaaagttttcttaccgagaagaccatggtcagaaactgacctcttgaatgagagggaaaggatgctgacaacatgtggcccttgtttgtttaattgtacatatacctttgcattattgcctaaactctttctacagtgttgttggattattgtttgtgcagcatgaaagaggaccgtttgagtttgtatttatgcaaatgaataagtaaataactttcagttaaaacaatgacaattcgttatttatcgcaaaaaaaaaaaaaaaaggacattagggcattagcatggtactgtcatttcaatattcactatgtcagatatcagatggtgaaacaagaaaatgacatgaatccatgctttcgaggcaaattgcattacagaattatttct

SEQ ID NO: 5030 - DNA, 2039 bp, Zea mays
ctcacgagaccgtccaggcgtccaccgcgacgcgctctcctgcccgtgcccacctccacgactccacctccgcagcgcccgcagtaacctccccacgccacgccacatcgcgtgcgagccccaaccgtcgccggcctcccaattaagccgcccccgcggcgcgatccggtgtccaccgctgctccgccggaggagggggaaggggaagaaaagggagggggggagcacagggggatgctagaggcgaagccgccgtcgccgggctccggcgcggccggggcggcggcgcacatccacggtcaccggcggtgggcggcgccgctgctggcctcggttctgctctcgtcgctcctcatcaccgcgtcgctcttcttttcctcctcccgcgcgctgctactctccttctcgccgctcccctccgcggcctccgccgagcctctcttcgtcgaggccaagctccgccagcagatgcgggccgaggagcgccccacgcggggcgccgtgcccaggatcgcctacctcatctccggctccgcgggggacggagccgcgctgcgccggacgctcagggcgctctaccacccggtaaacacatacgtcgtgcacctcgacctcgaggcccccgccgccgagcgcgccgaactcgcctctgccatccacgcggaccccgtctacgctaggttccgcaacgtcaaggtcgtcacacgggccaacttggtcacctaccgtggcccgaccatggtggccaacacgctgcacgcggctgccatcctgctgcgcgagggcggtaattgggactggttcatcaacctctccgcctccgactatccgctcgtcacccaggacgatctattgcatgtgctttctgagttgcccaggcagcttaacttcattgagcataccagtgacatcggatggaaggagtaccagagggcgaagccagtgatcatcgaccctgggctatacagcctgcagaagtctgacgttttctggataacagagaaaaggagtgtcccaactgcattcaagctcttcaccggctcagcatggatgatgcttactcatcagttcattgaatattgtatatggggatgggacaatctcccaaggacagtcctgatgtattacgcaaattttctttcttcaccagagggttacttccacactgtcatctgcaatgtccccgagttccgcaacaccacagtcaaccatgatctacatttcatttcttgggacaacccaccaaagcaacaccctcattatctcacactcgctgacttcgatggtatggttaacagcaacgcaccctttgcaaggaagtttggaagagaggatcctgtgctggacaagattgaccaggaactgttggcccgccgacctgatggatttgtgcctggtggatggacagacctactgaacacaactgagaaagggaaacccttcacggttgagcgcgtgcaagatctccgcccaggtcctggtgtggacagattaaagaaactcgtcacaggattgctcacccaagaaggttttgatgacaagcattgcctgtgaaactcccagtaagatgattctggggcagtaggttacacgctcaaatttgaaggcatcgggccatttgctaggaatgcccctactagctgaggcagcagcacattagcgtcatgtacgcgaggatgcaacgataaggaaggtgctcttacagacaactgcttgagttgagttaccgtacagcaggagaccacggatgtagcagtcggagatgattatacagaactagtagctcattagtttatttagatgattataatcagccccccaaccatgaataatgttggaatttttgacatctctgcgcccgagggttgtgcaaggtagcccattctttgtttcgaagccatggcacctggtgcaccagctggtagcgtgagacttcgttgtattgactagtggatgtttctgggtaaactgatacatttgattgcacacatgtattgatttgtttcttttctaaaaaaaaaaaaaaaagaagatgccat

SEQ ID NO: 5031 - DNA, 1136 bp, Zea mays
ttgggtacctcgaggccggccgggtttcgggtcggggccggcccggatactagcgtgagtagttttcattttcacccctgcctctgtatccgagcatactagcggatcctggcccgatccctcttcccaccccacccacctccgcttctctccaagtgaggaaccccaagccctcgccatggcgtcgcggatcctggcccgatccaaggcccttcccctcgtcgccgccctcacccctgccgctgccaaagcagcaacgcctatcgccggagcccgcgcgctctcgtccctgccccgctacccgtctgccccgtcgccccatgggctcggcaaggttctgggatatgaaccaacatctcacctcagtggaccacaagttttacctcgttggttttcctctctagcatccaatggatctcaggtgcagaagtcacagatctctgagacatacaagtcaggtggtgaaatgaaacagtctgagacacggaaatcaagtgaggaagccacaccaaaagttgtggcgttcagtccgctagaagcagctatcgctaaacctagaagtagtcccctgacaagtgagagttctaaagtaaggcgatcagagatagcaacccaagtcaccttttacatgatcccagccctgcttcttgcctccaagaacagcataagtacctcccttctggtcggcgccgtgttccatcaagtatacatgttccacaaggagattcttctggactacgtgcaccatgatatcaccagaaagtgggctttgatttacttcaagctgcttttgctggtgatggcgaaggacaccatcatgtacttcaatctgttctaagctcaccttctcagtttctcaaatatccagcaatgcatccgtctctgcactcgtagaataatgatgatggatgaattatgcagccttcgttcttgtattctccctaatgagcttgcttttttccagctgccagtttcactcttattaagtatatcagtctggatgggattgatagtgaccagtcagatgatatccctgattctgcacctcattaataatatgattaatgtcaattgtgcaactaaaaaaaaaaaaaatataaaaaaaaaaatataaaaaaaaaaaaaaaaaaaaaaaa

SEQ ID NO: 5032 - DNA, 2741 bp, Zea mays
aatgctctcaagagattatgttgtgtatgaagagtcgtgtagagacgcactattcacgaatagccgtttcttgtgttttttacatttaacccctagagacccctcaaaagacgggtattaaatgaggttacatataccattaagaaacagagaataaaaatacattctttgtaattcgatctagagatagttatgcctcatatactagtacggagggagtagtcaagtacactctgtagcgtggtgactttgtgtaagttaggatcaaaatctaagcaaccagttgctgtaggaattgtttttttggtggtattattatcgctatctatacgatctagagaaccatgttcaatctaatggaataaggtttcgtattgacctaggcaattttccctgggattagtcattttgttgaaagactctgtactatactctgtagcgtggtgatttttgctagatggcatgcttccatttaggaagaagagatacttttcatctgccctcatgtttacaattaccatgctgtagttgttctatataataaaagaagtgtttactctatcagcgatttggtttaaacagcttgtttcgatccgagatagggagcatgatagatttaaagcgctactgaaatcatgttctgggatttgactgtctggatattggctataatccaatcagtgaagttgtaaaaatgagcttttaagtatatttctatggcatagaacacagaatgcagatgtgactaggaaaagaagctcttcgctgttgaaaagccatctttaatcgacacgacaaaggtagcttatgccatgattcctgcaagtggcacttgcagcttggaccatggctaaccgtcaatggttcttgtttggaaatgttaacattcatttccatcttaagatcgttaaactcactttcggacaatattgttcctccaatttcaatagaaaattttagttgggccaacagttcagctgacttctctgtgagttggatagcatttgtccaattttctgtcacctttttgctaacttaaacgtggaaacacttgttgcaggggaccgatatttgaaaccattcgtcattccaaaaccagaagtcaccgttgttcctagggcgaaagatgacgactgcctcattcttgcaagtgatgggctgtgggatgtagtgtcgaatgaagaggcatgcaaagctgcgcgtcggcagatccagctgtggcacaagaacaacggtgtcacatcatcattgtgtgacgagggtgatgaatccaatgatcctgctgcacaagctgctgctgattatcttatgaggctcgcactgaagaagggtaccgaggacaatatcactgtcattgtggttgacttgaaacctcgaaagaaggccaagagcaactcataacactgggatggatccatcacggtagagctgaccatgatatgtccaaaggcttctgctgctagttgttggtcgtccgcaagagacttgaccccacaggtttttttcgttgggcctcaagaactgtaggtgcattttccatggagggttatgatgcttaaccccactctggtttctggtggctaaaacattctctccagtcggcttctaccatgagccctggcacttagtatatccctaatgttgtatgatggttgaacttgtaaagagacaagcggctgagacggtcactaaaattaacatattgttacttcatgattcaaggactatccatctgcctgaatccgatgaaagttttgtattgcagcttcaagtgtgtgcccacctatatatacagtttgattgggtacatatacatgattagttgggtgtacctccctaacatggctctttgtatgcgttgactagctccgagagcatgttgggttaactgcacgcactcgattagacatgcatgatgcaactcacgtatttgcggtagctttttgcctacatacgccgatacaggtaaaaatcacatatctgctgtcagggccaggctcatgcgagcacacctacacagacacagtcatccatcacacggatacggtctgattggatacctgcaggctcccgtgagggtggccgaatggatacgtcagttttgagagttcctgtggatgcaggtaagctaggtaatcaaacagtagcacgtgtaaagtcaacgcatacccatcagacggatagtaactccacacagactggcctgcaatctcatacaacaaatctaaggattcgtgtcctctccactacaataaaaacgcaaagctttggttctcgcggatgaaaggcagcaggtcattaactgacgtctcctcaatgtttggcattgacttcgaaatatcttcaagcgaaaagggtatgctgcgacaagaagagaaatgatattatgaaacgagtgtaactgagcaaataccatttggggggcatgaaaactagagcctacaaattgtcagggaatagacctggaatcatcatccagcaggaccgaaaagctggagacgctatttgattcttcgcgcagcatagctctcatgcttgacatgaactatgagtagtaaaggtaaattaaatgaaggtagctagcatttcgaacaaaacagtgcaagactaaagggataaagcctatcgtcttacctcggctgaagttacatttgttccctttaaatcatcccaatacataccgactatccgctctagctgctgcaaactgagagcctaaacaaatagctacatgagtacac

SEQ ID NO: 5033 - DNA, 3012 bp, Zea mays
atagccgcacggtgcgctgtcgcgtgccgaatcgcttgtgccgtcgtgcggtttcgtctcatctccctttttcgccgcacgccttggcccttttccagtagaagaagcgtcgaaggggacgcgcacatgcgccggcgtggcagagactgacccggccccaaggccgatcaggggaagggcggccgcccctgcctcccggggccagggggctgagctccccgcctcgtctcggcctggcctggttcgccctcgctccgacgcgtggtggacgcaaccagtgcgcgacgcccccggctcctggtccgttccgcagttccgcaccccgcttcgaccaaccaatcgccgccgcgtcgcgtcgcgtcgcctccttttttttccccgccctcccggacggcggcctcgttcgccagaagaaacccaggctgcagccgaaatcctcaagtctccgtcgtctgaccccacctcgacggcccagatccactcgccctcgccgccctcgtgcccctcagtccctcactccctcgcctcctcagcggcgaagacagctgcgaacggggccatttttaggcgggagcgcgggcggcggtgctagcagattggttggtttgagtggttgggccggctcttcgaaacgccccgccgcggcgatgggatgcttccattccacggccaagcggcagcatcctggctacgaggaccccgtggacctcgcctcccagacctccttcagtgttagtgaggttgaggctctattcgagctgttcaagagcataagtggttcagtgattgacgatggcctgatcaacaaggaagaattccagttagcattatttaagaatcagaggaaagaaaatcttttcgctaatcggatatttgaccttttcgatgtcaagaaaaggggtgccattgattttggtgactttgtccgagctctaaatgtgtttcatccaaatatcccaatggatgaaaaaattgatttctcgttcaagctatatgatatggatagcacagggtttattgaacggaaggaggttaagcagatgttaattgctcttctaggagaatcagaaatgaggctatctgatgatatcattgagacaatcctggataagacattctctgatgctgatgcaaatcaggatgggaaaatagatagaacagagtgggagaattttgtcacaagaaatccttccttgatgaagataatgactctgccatacctcaaggacatcacaacaacattccccagctttgtgtttaactctgaagtcgatgatctcgtcacgtgaccacgattttctctccgatgtatagttaacaaggagaacctgtcgagggttacgactggagatttctagcctctggcattatgaatggagggtatattcatgcggctaccaggaagggtgcgtcaaaattgtctgccacagatgtacttgacgagctgtagtttttactcggtgataatgttgatgcttttgtgttggtgatgattgggacttgagttagtatgcagagatgaacatttttcatttttaccagtgggaagtctctattttgtttgtgaaactgcgacgtgcgtgtctgtactgatcaaatatgattcttgtcaaagtagtactgcattctactattttagcgtaaaaaaaaaaaaaaagaaccaaaacttgcatcacatgtcattgaagtctctgagttattagtgtccacttatatatcttatactgtatcaacttaacactacatcctaaatataaggattttaaattgtcgagttgaaatgttccaaatgtgaccagctttataaaaaaaacaataataatgacggcatcaaattagcttcattagatttgtgagacaattttataatttgccactttgatgtgatagatattagctttataaaaaacaataataatgacggcatcaaattagcatcattagatttgtgagacaattttataatctgccactttgatgtgatagatattgatagatattgggtgtttggtttccagggactaatttttagtccctctattttattccgttttagtccctaaaccactaaagtttttgtatttggtaatttaaggactaaaacggaataaatggagggactaaaaattagtctctataaaccaaatacccccttagttaaaaatagaataatttaatttaacttcgtgtcgaggatacgatccacggtccctagggtccatccgtcagcgagcacactggggaaaggctctgggtccatcggttagctagaggattaacgtctaccctggaagaacccgccgccggacgaaccccacgacatcgagcccggggtcgggcgtggtgcaacctgactggagggttggacatgccgaagggaaatcaatcgagtggatcccacgactggccaaagaccaacctgtcagaaatgaccgggcgtattaactgcgcctcgcgccgagccatagcgaaggtgtcggtctgcctcccactcatgtgacctatgaacccctcgggccgtagtgcactcatgaccaacaagcccctcggactgcgtcgcatttatggcgcacacatccccggccaacacacttatgacctatcggacatagacttgagtgcgtagggcgcaatacgacgaaccgcgtcgagccccaggctacgaaggccaggggtcaacatagcccgaatgatggcgcttgggctccatggcgcccgcgccgcctgccataaagaatatgagacagccaggcgaccacgagaacgtgtgactttactcccatggtagaacgatcggtttaccgctacctggtgactccttcctaaggaagccaccactagctgaacccttctttagcctataaaagaggttggcccctagacgaggggatcccgaaacggacagacggaaacacccagaaggatgaaccccagacgaggaggaggacaaggaggctgaagccccgctgccaagccaaaacttagctaggactccaccttataaccacctcc

SEQ ID NO: 5034 - DNA, 1904 bp, Zea mays
cggacgcgtgggaaaaaaaaaaaaaaaaaaaaaaggaaaaaacttcaacctattgtcttctctgtttggccaacagtcaatagattcatttcagatatacaaagtgcttcaaggattgtgctgcaccgcactgtactgaagaccacaaaaaaaatgggctgcaaaattgtgtacaattactatccactcattctacaaaaccatctgagattttttacaaagctactctaccaaaatccgttggtttccttcccatctaaatgacctagcctttgcacccattgtgaccctcaattttgtacaaacagggtatctcatgccttaattttcattactttactactgtctatgataactagtagatagcaaatctggaagcaagtaatggacagctgaacattgaatctttgccacgggtcattactgaagtaggccatcaccttcccaaccaagccgcagcatctgatccaccaccttcaagctcaaagcgggatcagtaaagactataagctgtttatcagcagtagaaactaaaagatttgtgttctctttgtttagagcaattgctgtgatgtcctggccctttgccagcttcagagtatgaaaaaccttcagtgtatgcaggtcaacaaagcagattgaaggcgcgtgaacagattgttcagaattttttgatacatcatcagtgccattgggtccaagctcatgatccccagtttcagtactgttatcacacttgtagttgttgaacaaagatgttccaaataaagcaaaatggccatctgtagaaatctcgatgcaactaacttgtccagagaaaggcaacagaactgagttagcaatagggagtccattgacagtgaaggtagataatgttttctttgttccattccaaaccaaaatgattccttgagaagataagcatattgcatgtgcctcatcgacatcaagcctccttatcagcctgcctgtgcgtaaggaatgcagaagaatgcctgttgcatttgatgaggaagcaacaagtcctaagtctggactaaccgagcagcaggttacttccccaagatgtcctctcattacatgcattggaccttcaacgcgacgtctctttgtttctgagaggctgctcatggtgctagtgctgccagagagaggactgcgtggtgtcgttggtgtagtcggtggaggttcttgagcatttttcttatgtgaggagcctgtctgatgaatcctccagagtataactgtggtatctctagaccctgtcacaaggtagttgctatcaggtgacagcgcaaggcatgtcactggagcaatatgcccagaagcagtttcaattgtcttcgctccatctagggatatcaacttcaatgaaccatcaacgtggccaccagtaattatctctttgtcacatgtcacagcaacaactgctgaactgcggattgcagaagcagcaaatgctatagcccttgggaacccataatcttccgcagaaccagcagatcctttgaaaatgcgcatgagtgcgccactggttgaatttgtggaatttctaccatgatggaaaaggaaaggtgttccctgaccatctggagtattagcctgccattggtgaagtgccacatgtgctgctggggcatttacatcaacaactacaatagagtcgtttgatacaagcatagcactggcaggaacattgcaacgatctgaatgtggaagcacatatgatttaagttcacttggatttcggaatattgtctgtagttgtaagacctccgccagtggcttcctcttcatgtgaggtacagtcagcagttgagatggtgtttgtccaaagtaagctatttgatcttgtgtagctcgccgatccactgggtttgtaattttgtcaatgtcaacagtcc

SEQ ID NO: 5035 - DNA, 1400 bp, Zea mays
atccgttcccgtgggtttttagtcgcggcctcacgggatttgggtggaaaccgcggggggtcctttataagcgcggggcccccccggccgggggcgcgagcccccccgcgttcacgagccagaagagaagagaggctaaccaccgcagcagctgcgacctgcgagtgcgacaacctccgcggaggagttggagccggcggcggggatatttgcttgcccggctggggttgcggcggaaggagggagagacaaccggcgatggcggcgtccgcgaggcccggggagagggcgacaagcttcgccgtcgcgtgcagcctcctcagccgctttgtccgccagaacggcgtcgcggctgccgagctaggcctcaggatcaaaggcgaggtcgagcagcagaggacgccggcgacaactagcttgctccccggagcggagggcgaggaggtcgaaaggaggaaggagaccatggagctgttcccgcagagcgtcgggttcagcatcaaggatgctgctgccccccctagggaggagcaaggagataaagagaagcctaagcagctcacaatcttctatggcgggaaggtgctggtatttgacgatttccccgccgacaaggcaaaggatctgatgcagctggccagcaagggcagcccagtggtacagaacgttgctttgcctcaaccctctgcagcagctgctgtcactactgacaaggccgtgctggacccggtcatcagcttggccgctgctaagaagcctgctcgcacaaatgcttctgatatgcctattatgaggaaggcttctcttcaccgcttccttgagaagagaaaagatcgcctcaatgcaaagacaccatatcaaactgctccttcagatgccgcaccagtcaagaaggagcctgagagccagccatggctcggattaggaccgaatgccgtggattccagcctgaacctcagctagtacacaacaacacagccataataagacggcacagcaacggcacccaccatgacctggaatttgctttgccactagatcgagttcagaaaccataaatattcttagttatcgtgttttagtgttcgcttatgtcatggttctacgccctcttgtcgcatagttctggatgtaaagaaaagtagccagtcatgaccatcaccgggagtcggggagaagtttttggagggtgttaacacacggcgactctgaattggccatgctaaggaaaaggatagtgcaatgtgaggtatatgtattttctgaaagccagatcgtttgggtctagccctgatgtatgcagaacaagtgattattgtaatggatcctgattatcctcatcatcctattgttgttttctgatcacgacaaaaaaaaaaaactaaagcttgtacctgccc

SEQ ID NO: 5036 - DNA, 2524 bp, Zea mays
gccgggtgattttgagaatccatggctgaaggtaccttaaagcaaaatccgctatccaatggtcatggtggaacggacacaatagcaggattattagcatcactgatggaagttgtgcggacaacagtagcatgcgagtgtgtatatgttcgagcaatggtcatcaaagctttgatatggatgcaaaatccccggccggcttttgaagtgctaaaatctatcattgcatgcgagttgtctgacccagcctggccttcctcgctcctgaatgatgtcctactaaccttacatgctaggttcaaggcaacccctgatatggctgtgactctgcttgagattgcaagaatttttgccactaaagttcctggaaagattgatgctgatgttctacagttgttatggaagacatgccttgtaggagcaggaccagatgggaaacatacagccttggaagctgtaactatagttcttgatctgccaccacctcagcctggttcaatgtctggactcacttctgttgatatggtatctgcctctgatccaaaatctgcaatggcactccaaagattagttcaagctgctgtttggtttctaggagaaaatgctaattatgctgcatctgagtatgcctgggagtctgcaacaccacccggtactgcattaatgatgctagatgctgataaaatggttgctgctgcaagttcccgtaatcctacacttgctagcgctctgacaaggcttcaaaggtgtgcatttagtggaagctgggagatccgcattgctgctgtacaagccctaactaccattgcaataaggtctggtgaaccttatagactgcagatatatgaatttcttcatgctttggctcttggaggtgtgcagtcaaacttttcagaattgcagctaagtaatggggaaaatcaaggtgccagtggtactggtcttggatctttaataagcccaatgcttaaggtcctagatgaaatgtatagaggccaagatgatcttgccagagatattcgccagcatgataacagcaaacaggaatggagtgatgaggaactcaagaaactttatgaaacccatgagaggcttcttgattttgtttccttattctgttttgttccaagggctaaatacttgccccttggtcctaccagtgccaagctaattgagatctaccgcaaccgtcataacataagtgcttctggtggtctaagtgatcctgctgttgccactggaatatctgatcttatgtatgagtccaaagaagtacataaagagaccaatactgtccagtctggtattgatcccgatctggcaatggcctgggcagcaggtttggaagacgatgtttgggcaaacaacgctccagctgtggataaagtaaaggacttccttgccggtgctggaactgatgctcctgatgtggatgatgaggaatacatgaactcgaggccatcagtcggatatgatgatatgtgggctaagacaattcttgaaacttacgatgcagaggaagatgatggtaggtactctggtggatcctctcctgaatcaactggttctgttgaaacctccatatcgtcccattttggaggcatgaactatccatcactgttcagttcaaaaccgtcaagtcatggggcctcacaacaaacgatacgtgaagaaccaccctcatattcgacgtcagtactacagaggaaggaatcatttgaaaacccccttggagggggtggaggacgaagtttcggatcccacgaggatgaagataagagttctggtaaccctcagtctgggaaagctttgtatgacttcacagcaggcggtgatgatgagctgagtttaaactctggagaagaagtggagattgaatacgaggtcgatggttggtattatgtgaagaaaaggaggcctggaagggatggaaagatggcaggtctggttcctgttctgtatgtgagttcatgataacagccgtgtgtatcgtttcccacacttgtggaagctgtttggagttcatgggcttaacaaaaaggcacactggaatgctcccgagagatcttcgcataaactcgtgcccgtcgtataggcacgtggccttgtggaagcaggtcatatccagtcatcttggggttcgtatgatgctgcagtgctgttcctgggaaagatttacgtgttgatttgtctggacccacaccacgagtcattcaattgattgttttttgttgctaaggtggagactcttcagaggttaaaccgttcatctgtgccattttgctgccgtctgtgttcaagaaggcaatttcgtcgtctccagttcgtgttgtgcgatatatattctagtaaaattgtagaggcatcatttccccggcatatattattttggtcgtgtatggtgtgattctggtggtaaaatagtgtcattaatcttgtgtatatttgtttccgggtggattacagagtatataactataagggggtgtttggtttaagaaatcaagcaaaaaaaaaaaaaaaa

SEQ ID NO: 5037 - DNA, 2807 bp, Zea mays
ctcgaggcgtccatacgcctcagccccagctttccactcgctcactagtccccccccccctccaccgaccccgaccccgatccccgccggtgcttcgccaccccgatccccaccgcgcgatggcggagccggctccggctcccccggtgaccgcgccgctggtggggctgctgtacgacgagcggatgtgcgcgcacgcgacgcccgacgggaaggaacacccggagaaccccgagcggctgcgctccatctggcgcaagctcaacgccgcgggcgtcgcgtccaggtgtgtggcccttaaggcaaaggaagctgaggacaagtatatagcttctgttcacagcaagagacatataaagctgatgaaggaaattagctcaacaatatatgatgccagcaggaacaagattgctaggaaattcaattccatttacttcaataagggttcctcggaatctgctgttcttgcagctggttctgtcatagaggtagctgagaaagttgctgcaggtgagttaagttctgctattgctctagtcagacctccaggccaccatgcagaacatgatgaggctatgggattttgcctcttcaacaatgtggcggttgcagctaattatctcttaaacgagaggcctgatttaggtatcaagaagatattgattgtcgattgggatgttcaccatggaaatggcacacagaaaatgttttacgatgatcctcgtgtattgttcttctcagttcacagatttgattatggaagcttctatcctgctgaaggggatgcttctcattgtttcatcggggaagaagctggtaaagggtataacatcaatgttccctgggagcatggcaagtgtggtgatgctgattatattgctgcatgggaccatgtactgcttcctgtcactaaagtttttgatcctgatataattctggtatcagcggggtttgatgcagcattgggtgatcctctcggtgggtgctgcattacaccaaatggatatgcactgctactaacaaagttgttaggatttgctcaaggaaggatagtgatggcccttgaaggaggttataaccttaggtccatagcgaactcagtttgtgcttgtgcaaaagttctcttgggagacaaattcacattcaacactccagagatgcaaccatttgaatctacatggagagtaatacaagcggtacgcaatgaattgaagacatgctggcctgttctgagtagcaagttgccagaaaatgtatcattgaggattaagcctgcaccaagcgagctctacgcttcttctgattccgaatctgatagtgaagatgttgatgagctccttggcactgttgcatctgtcaatgttattgaagctactggtgttgctataagtgaacacctctcaaagatgaaacttgatgatgacagccttgcagtgaagactaactcaagttgctcagcagcagaacagcatccagttgattcagtaaaagtacataacaatgcatctgttgtgctgaccaaaaaaatatctgatttatctcttgagtggcgatcagatttatcgaaaactgatgtctggtatgccagttttggatcaaacatgtggagaccaagatttctatgctatattcaaggagggaaggctgagggtatgaatataccatgctgcggatcacgtgacacaagctcaccaaagggaaccgtgtggaagactgtacctcacaggttgcttttcggtagatcgtctaccccttgttggggaactggtggtgtggcttttctcaaccctgagataaactacaatgagaagttgtatgtctgcatgtacaaaataacgttggagcagttcaatgacatcttgtttcaggagaatcgtttagtgctggaggatggcaaagacggaaacactgtgtatcctgactctcctttgattggttcatctgaaatcaagtttatatctacaaacagagctgttcatcttgaacctattaaggatagctggtactccaatgtactttatcttgggaatgaggatgaagttccaattctaactatgacgtgccccgcatcagatattgagaggtataaatctggtgagctgcgtttagcacctccatcagagacgtatgcggccactctgataaagggactagtggaaggcaagcaaatggatgcggacggagctgccagctacatcaacgctgctgctgcaagagccttgtgaaggctgcttcagcgtgtgcttttgtacagccagtaaggagtagtaaggatacactatctgttagcgtggcgacaccaggaaaccttcattgtccgcaaatggagaacttggatccaatttgaattgggcagcatgattcgagctcgccctagcttgattactggtgaacggtgatctcccctggctggttgattctgggagaaacactagctgtgtcggggtggagcaacactagttggcggttgcaacaggtgctctcactgcactggtatcgtgcttgtctgacataccgtagtatttgcatggcatgctggtgatgttatttgtgcaattactgcattatgttctgttaaaaaaaaaaaaagaaaaaaaaaaaaaaaagaaaaaaaaaaaaaaaaaagctcgagggggggcccggtacccaatccgccttataaggaggcgaattacaattcactgccgccgtttaacaacgtcggatggggaaaacctggggtacccaactaatcgccttgaaaaaatccccttttcccagttgggtaaaagcgaaaagccccgaccgacgcccttcccaaagtggca

SEQ ID NO: 5038 - DNA, 3793 bp, Zea mays
ctaagctggttcagtatccaactgatggcaacctcgcaggtgtgacgcttcatggcagcggcgtcccgatcttatttttgtatgcagtggagtgtcctatcgccagcacggcaccactcaccagtggatgatcgtcacgatgcgtggagaaggagaaacgatagcgaaatgcggaatgactgaaccatcgagatggggggaacgggccgggcccggccgggcccggcgctcacaccgctgtagccccgtcccactcccacgtcccacaccacaccgatagtaacgagacgtggggcagccggtgcgagccaggaggaataatggcgggcgccatgcggctgtctggccgctgctacccggaagcttcggcgaaggcgccatggtccctctcacacctcaccagcttcccggccggcccggaacggacgacgccgcgctccgctccctgctcggcgccggcgccgggccgttctcgctcgctctcgtctcgtctcgtcagccgtcagcagggggttcagttaccatgtgtcccccggctacttttgtcctgtcaggttgccccattccttcgtttcgagagtcgagctctgcccgtcgcggttgcattgcagcactgaccaccaaccagatcggaactcgaaggcacggctcttctcgtgcctgtgtctgtgttcagtctcacttggcgtttcactgaaaaatctccgtcgaaaaaaataaacaaaaaacgtcaatgcggtagtttccaggtgcagcaacaacagtgcaacacctacgcacagagtcacagtcacagactcacaggtcggcagggggagatctttccggaggcgccagtgccggtggcagtttcaactttcaacgcgagaatagatagatgcaggtcgggcggcgatcacatcctggagtgtggtgtggtggcctgacacgacctgatccgaccccaataattctcgccgtctcactcaccagtggatttcctcgccatcccgcgcgggccccgacgtcgtaccagaccgatgccatgatcccacgattcccaccccctcccccggccggcaccccacgtcgtggcgaggcagttggccgctccgccgcgcccccgcccccgcccttgtcaggacacgagtggcagctattaaagcgcggggtggggatccttgcaaccagagccactgccaccactgctgcccacggccacccacaccacaccacaccaatacaccataccagaaggagcaaaaataagacgagatggcggacgagcgcttgcctcaaacggccggcgcccgcacggctctcgccagagctactggatcctcggcacggaaacgcgcccgcgatagttaggtgcgcctgtgggcccggccggctcgtcacttacataggcgcacgcacccccgcctggtgcgtcgtcgatcgctgctttgctggcgcgcggcggccctgtgtggcacagtagaggtctgctgaggacgacgaccggaggcgtgctgcgtggatggtcctcatggccgggatgctccccggcgtggagtgcgcgcggcggcggcgggtccggcagggcggggcggggatgggagcggaggcggccggaggaggcacggggcggcggtcctccttctgcctgtacgcggccggccacggcggcgccggcaattctggcaaggtaggagaagcacagcacagagattcacagccgtctggtcctgttgtcgcgatgtataagcagcgtacgtaaaggcggttgtgttgttgttcacggcagcggagcggcggcgtggtgcacgggcacgggtggacgctggacagcaatgcccgggaggccaaggagcggctggaccagaagctcaggaccaagagggaggccgccatcaagaggtagacgcagacctgccacccgacacacacatccatattattcatccatcctccacgggctttgcttgtgttccgtgccagtctgaacaacactagctagctaggtcgttgttcctaaagatctgaccttgcagcaggcaccacagcacggggagcataaagctgggcgtgccgcaccggagcgccggcgcggacgagcgcggcgagagctccgcgccggcgatggccggcgtgcagcgcgaggtgtactcgaagaagggcgtgatgcggcggctgatgcggtggagccggccgcggtgggccgcggcggagcaggcggagtgcgcggtgtgcctggacgagttccgcgcgggcgacgtgctggcgcacctgcgctgcggccaccgcttccactgggcctgcgcgctgccctggctcgagggcacctcgcggtgccccttctgccgcgccgccgtggacgccggcgccgccgccgccgccgacggcgcctagaagcggccgaggctctggtcttgctggggcttgccctgggctgggacggcgcggggcgccttgtcgctgtcggcccacgccagctacgctacccccatggcgttgccacgctaggcagtggctagtgggggtggtcatggtgagtggtgaccggcctgcttgtgcatgtggcgcggagcggaggaggacagcgagacgcgcacgacgaacccgtgagtgccttggcagtttttgcacgctttgcgcgcgcaaaggcacggttggtgcacatttgttggttggaccgtttggcccccctttgccgtgtcctcctcccatcatcgcgagcaagtgatgaacggttttgttttcgtgtttggggagcgctttgtttatggactctggtattagcggatagcggttccatcatgtaattcatgtcaaaaaaaaaagatcgtctgatcgatcttggagaaagaactgtaatttagatcaacatcaatcacatctgtgtacagtctcagtgttgttgctctgaacttgtataattttctgtttgctcagggggggcctcttgcggttggaggtgaggtctctttagaacgtgatgctaatgtaggatcttgttcccccatgaccacgcaggatattttttttgttctgttaaaattcccgcagtgttctcgcggaacatatgcttccccgaaggatgctacatgatcatgatgcccatacatgtggtcgtcgtggatccgcattaccatatactcggggtgtacggacccaacggtttctccagccctcccacaggccacagactgctgccctagtaggcggcgtccccgggctccggcgactctgctgcagtagctagctgcagcctcctgcaggaggaccagaagcgcagaagccagccccaactcccagagtcccagttccgctttccggtgagatcgcggctggtccttctccagttctcctccctgtcctgccactgccaccgcaccgcacgactctgaacgctggcaatgcaataggcaacggcaaagccggagacacgcttggttttggctctgtccgtgtccgtgcaatcatccatttgctgccttggccccctccggcctccctgctgggccctgggcgcgcgtacgtcatcacgtgtcctgcctgcgcccccggagcgagcggcagttcttgtcgccacgcctctaatggcgcgcatgcatcgcgtcagtttcgatggcgatggcaccagcaccatggcgccgccctctttaccagttaccacccgcctccacacacacacacacacacacctctaatggcggtgagaacggctgttagtggtgcgcgcgcaagtggtgaggatctctctggtctctatgcttatcatctggagaagacctataccctcgtgttccgaaacctgcaggcatgcaag

SEQ ID NO: 5039 - DNA, 1367 bp, Zea mays
cctcgaggccggcctggccgggataaattataactctacacgcctgttgtactgcggccgggatgagatcggggtcggtgcccatggtctagtcccgaaatttgcagccggcatccacgagagctacgaccagcggccagccccccctttcggcctttccctcccatatactcgccgtcggccagcggatctaatcggggcgggcgcgatggctgggcagaaccagcggctcaacgtcgtgccgacggtgacgatgctcggcgtcatgaaggcccggctcgtcggcgcgacccgcggccacgcgctgctgaagaagaagtccgacgcgctgacggtccagttccgcgccatcctcaagaagatcgtcgccgccaaggagtcgatgggcgagacgatgcgcgcctcctccttctccctcgccgaggccaagtacgtcgctggcgacggcgtccgccacgtcatcctccagtccgtccgcgcggcatccgtccgcgtccgctcccaccaggagaacgtggccggggtcaagctccccaagttcacccacttcgtcgaccccgccgcggcctccgggggcccctccaacgcgtccccgagcctcacgggcctggcccgcggcgggcagcaggtcgccgcctgccgctccgcgcacgtcaaggccatcgaggtgctcgtcgagctcgcctctctgcagacctccttcctcacgctcgacgaggccatcaagaccaccaaccgccgcgtcaacgcgctcgagaacgtcgtcaagcccaggatcgagaacaccatcagctacatcaagggggagctcgacgagctcgagcgcgaggacttcttcaggctcaagaagatccagggctacaagaagagggagatcgagcgccagatggccgccgccaggctatttgcggaggaacagcttgccgaggatctcgcgcttaagaggggtatctccgtgggggctgcggcaaacctgctggttgctggtggggagaaggacgacgacatcatcttctgaccactccttccatggccatccagtcattcaatcgtggcagaaacaataagttgatgctggagctccagaattgtatctgtttatagaatgatggagattttgattcagtaatctggagtctagccatccgagaccctcaataatctgtacctggaaaccaaacagtgccaagtaacttttacggagcgttatgtgcagctcgtgtagaaaattcaattgaaccgtatttcctgtcgtgtaccttccagtaccgtattatattatatatttattattcaattggacctgcactcagaagttgcagtctgggacgtatttgcttttgcattttataaccaaaaaaaaaaaa

SEQ ID NO: 5040 - DNA, 3040 bp, Zea mays
cccctgatgtggatctaatcgaaaaataacacatcctaacaacaagtttaatactcgagattatggtgggttctaatcctgatcatgtgatctgcagctaacaataaacatattcatatactaaagtcgactctaatgttggcttttagacgaatcatacgtctatttctctttcattcttttgtcttgaaatccatgtaccacctagctattgtataagagcgaactatctttactttgttatgtctctctctcccacattagcaaaattgccatagaagtatgcttagagctcactattgaacttgctatagtttatctcaccactagtacttggtcccacacgtaatacgctcagtttcttagaatatgtgaaaacttatatctatttgctcgtcgctagctattcttgttttccccatattttctacccacgtagtaaagagagtgaatctagctagtgaatagctagccattggagacgccctaagactatctctaacaaactagccaaatggctcgtcaacccaaattttagctactcaacagcaaaataactctccaacataccagctatctgactcgccaagctattcgagccaaacttggctagccacctgactagtcaaactagatagaaagtctgttaaagggagaatgtgagatgctacgtatagagtgtaatctttatgaaaagataaatcgagagaaaaaataaagagtctcttgaagatgtttacttaatttacgctctgattgcctatcgaaacaaaaagtcgatgccttcgattttgtctttgggcgctatcattatagacatggaccccccacctttagcatgtggtcctctatcaatcagtctagcaatatcccggaaacattaacacgttcatttatggactttgacattctcaaggaagttctgatgcacccaagtttattaatgtgttttgcttcagttgctgcataaccataggtcgtgctctttatgcagatttcactccgtctcgtggcagcacacccgtctaccagcccagagcgcagacggtgatgagcagcatctttcagccagacacgcgcagttccaaatcaccggagccttctccgaccggacggaggaagctcgctgagctgctgcaggaggcaatgcaagacggtcccgaagaaagcgccgacgaggaggagcagcagcagcagtcgctatctgctgccgctgatgggaagccgccggtgtctgagtccacgtccagctccgcttgcagcaccgtgccgactccggtcgcagtcgccaagagccggaaggagaaggcgtggtacaccggacgctgttgcctgccgagctttgttcatagcctgaccttagacgagagtgagagggggcagaagatgagctctaggccatgtgctgtttgacggtggggctccagtgccctcctgagtcctgccctgagctgtatttagcgcgatatgttatctgaatgcccgattgggacgctgaagctactgtattgagagtactatatagtaatcaagtggataataggcactcgttaaatcctgtggagaccatgtgtatgtgtcgaccaatttgcgcgggtagagcatctacctcaaggaattgcccttccctgtgcatgtctaactgaatctttgaataaataaacacactgtataatttttcagatgcaaaaaaaaacaacagttcctacaatgttattggtatgagatgtcctcttggcgcttgcttgattcacgccagacaaatgtgttgtttcactgctctgttctataccaagtggacctttgttttgtttccttctaaaacaaatggtttttatttggcagctgtgtcatggatcatgcagggttcgtggtttttagcgctgatcgagcgtatgacaagggcaggctaactgctaagaatgtgatgtgatcaccgtttcagttccgtccgtcccaaatagcgcgtgcctgactggataaccacaaggatggccaggagcccaagaacttctacatcctttttgtttgtttctgaacatgcgtacctgactggaactgatgttaggcagaccaatgaatcttagcagtggccatgaacccattggatcaaacatggcattggcaaccgaaccaacgaacgaatgcccaaaaaaacgtacgtagtatatacttatagcacccatgggtatgaccgtatcacaacacaatggcccgccctgtgtttctggtttcccatgatgctcttttgtgtagtcatttatatcaagattgtgtttctgttttctaattgtgaaataaagcatctgttgatacaatgataaggcaatgtagcattacaaactacaaggttcctttaacggtacagtattcagggttataactccgtgttgctacacctgaaatcacgccaaccgcctgtctgacgaggaacatgtcgatagcatcatgaagatcacactgatccttttcatgctcagtacctgcacccttggtccccaacaagatcgacctcccagtgttcgtacaatggtacatgtagctccaaccgtcacgataaatgactaccgaagtgtggtagccatgaaggaccggatacgttgcaggagttctgccttcaccgaagcaggcactgatgctcttcctttcggaacaataacatgaatgaggtcatctaccctcacattatttcttcctttcttccttacatagtccctgcagaatgccttcatctcatccatccagccgcactcgacgagccgctcgcggaggagctccgtcagcttctccttctctccactctctacaaacttgatgttaatgatttctacgagagaaggctccttgtcccgatcctccaccgcgctcggcgtaggcggacgattaatcgattccctcatgcttcaattcggcttagatgcgccctcctttagcttcgtcgctccttcgattcctgagcggctgagcgtcgtcttcctcggtttggtggtggagtgcgtcctggcatctgatgggtcatcatgccggcctcgaggtaccc

SEQ ID NO: 5041 - DNA, 3457 bp, Zea mays
ctttgcggcccgcccggacgcccccgccgggagcagcaacagtcaatcacagtccccgcttcccggcggccaccgctgcatcctcccctttccacgctccactctcctagcgcgcccgccttcatgggccccgttcgactcgccctcctcctttccgtcgccgccgtcctcgccgccgcgggcgcggtgtacatcccctacaacacgtcggcgggggtggtgccggggaagctcaacgtgcacgtcgtgccgcacacccacgacgacgtcggatggctcaagaccgtagaccagtactacgtcggatccaacaactccatccagggggcatgcgtgcagaacgtgctggattcgctcatcccggcgcttctcaaggacgagaaccgaaagttcatctatgttgagcaggcattcttccaaagatggtggaggaaccagaatgacatgatcaaggatacagtgaaggggctcatcagctctggacggctggaattaataaatggtggcatgtgcatgcacgatgaggcggctgtacactatattgacatgatcgatcagactacacttggacacaagtacatcaaggaggagtttggccagatcccacggattggctggcagattgatccgtttgggcactctgcggttcaggcttaccttcttggcgcagaagtaggattcgatgctttctatttcttccggattgattaccaagaccgtgatacacggaaaggaacaaaagaactcgaggttgtatggaggggctccaagaccttgggctcatcggctgatatctttgctggcatctttccaaaaaactatgaaccacctcctggtgatttttattttgaagttgatgataattcccctgttgtccaggatgatccccttcttttcgattataatgttgaagaacgagttaatgattttgttgctgcagctgtagcacaggcaaatatcacgaggacaaatcatatcatgtttacaatgggaacagacttcaaataccaatacgcagagagttggttcagaaatatggacaacctaattcactatgtgaacaaggatggccgtatcaacgctctttattccacaccttcgatttataccgatgcaaaatatgctgcaaatgagcagtggcctctcaagaccaatgatttcttcccatatgcagacaacccaaatgcctattggacgggttactttacaagcagacctgccttaaaacgatatgtccgcacaatgagtgggtattacctggcagctagacagctggagttctttaaagggagatatagctcaggtctctcaacggatagtctaggtgatgctctagctcttgcacagcaccatgatgctgttacaggaacagagaaacaacatgttgcaaatgattatgcaaagagattgtcaattggatatacacaagcccaggagctcgtttcaacttctcttgcttgcttgacagagtctggctcaaaatcacgttgtgcatccccagtgacaaaattttcacaatgtcttctgctaaatgttacatattgccctccttctgagatggacttaacgaaaggaaaaagcttggttgttcttgtatacaactcgcttgggtggaaacgagaagacgtcattcgtataccggttttcagtgattcgattgtcgttcatgattctgaaggacgagaaattgaatcacaacttctgcctatagctacagcctcgttgaacataagagaaaagcatgtcaaggcttacctgggcacaacgccaggtgcaaagcccaagttttggcttgcttttcctgtgtctgttccacctcttggtttcaatacttatttcgtctcaaacttgaagaaatcagcacatatttcttcgaagtccactcagtactcacctcaaggaagtgaaagtagtaatctacaagttggtcaaggcaacttgaaacttcaatataatgaagctggaaaattatccctgtactccgatagtaagactatggttcaagcaaactttgagcagaaatacaagtattatattggacaggatggaaatggaagtgatcctcaggcttctggagcatacatattccgccctaatggcacagttccaatcagtactgatgggcaggtttctctcacagttctgcgtgggcccatattggatgaagtgcaccagcagataaattcatggatttatcagattaccagggtttacaaggagaaggactttttggaaactgaatttatagttgggcccataccagtagatgatggaaatggaaaagaagtagcaactgaaattgttacaaacatggttacaaacaaaacattctacactgattccagtggacgtgatttcatcaaaaggataagagattatcgatcggagtggaagattgaagtgcaccagcctattgctggaaactattatcctgttaatcttggcatctatgtggaggatggcagcaaagagctgtctgtactggtagacaggtcaattggaggttccagtataaaggatggacaaatagagctaatgctacacaggaggctactccatgatgatgggaaaggcgtcgccgaggcgctaaatgaaacagtctgtctcgataagcaatgtgaaggactcattatacaaggaaaatactatgtcaaaatagacccacaaggagaaggagctcggtggcgtcggacatttggccaggaaatatactcccctctccttcttgctttcacagagcaggatggaggcaactgggcgaattcacatgttgcaaaattctctgcgatggattcaacttacagcttgcctgataatgttgcaatgcttacccttcaggagcttgaagatggaagtgttctccttcggtttgctcatctatatgaggccggggaggacaaggatctttcgtctttagcgagtatcgacctcaagagagtgttcccggagaagaagattggcaaggtcatcgagacaagcttatcggcaaaccaagaacgcgcagccatggagaagaagcgtttgaaatggaaggcgcaaggttctgcggcggacgagaaggtggttcggggtggccctgtggatccttcgaagctcgtcgttgagctggggccaatggagatccgcacattcatcgtcagctttgatcacatcagtgacaagcaacagctctaatcgtctccgactagacgactaggtctggatgaagttgtcgtgcggcttcgaaataaaaaataataatgtggcctgctgtgtacctgtggttcaacccatgatatggcctgctgtgggtcagcacggttctaaagctaaggacattttataaggcaaattttgctttagggtgtcactcctctcctcacgttgcaaaaatacagaaaaaaccagcgaaaacatgattgcaaacaggtaagcgcccgccccccccccgcaattttataaaaaaaaaaaaaaaaaa

SEQ ID NO: 5042 - DNA, 3083 bp, Zea mays
  misc_feature (2872)..(2872): n is a, c, g, or t
gcacgagaccattacctagaacatcctaatctaaaagatagagaaatgagcttcgctgttcgagaaaacagcagagcccggccgaattcgttgggcagcctgcggagatgcagtagaggccgccaggcgcagatggaatgagcgaccgggctctgctccgccgctagcctgccgccgcaccgcgccgtcgatcgccgcgccatgaacggtccccgcggctaccccctttctccaccggcaccttacccccgtatggcgtgatccaatgatagcaccaagagcgcaccttcccctctccctgacggcgtcgtcctccccgcacggcggcgcgcgcacccgcaccaagaagaggaagaaaccatgtcccccaacctggacagcgccatcaagagccaggtgccggcgctgctcctgaggcgtctcttcggcgcgtcccggcgggacgaggccaagcagctccagcggaccccggcgccggtggggaggcggcgggtgttcgtgcagacggagaccggctgcgtgctcggcatggacctggaccgcggggacaacgcgcacaccgtcaagcgccggctgcagctcgcgctcaacatgcccaccggcgggacctcgctcaccttcggcgatcgcctcctggagaacgacctctccttcttacgcccggactcgccgctgctgctcacccggaacagcatcaaccggagctgctccaccccgtgcctctgccccgtctccaaggacttcgagcacaaggactgcagcggactggttgagatgctcggctgttccagcagctgtgcccgggtgaagcgcctcgtggacgacgtggtgactgccatcaggagcggcgtggatccggtccccattagcagcggccttggtggctcgtactacttcaggaacgtcttgggcgacagggttgctattgtgaagccgacggacgaggagccctttgcgccaaacaatcccaaggggttcgtcgggagggcgctcggtcagccgggcctcaagagatctgtgcgagtgggagagacggggtttagggaggttgcggcgttcctgttggaccatgacaacttcgccaacgttcctgccacggctctggtgaagataacacactccattttcaacataaactgcccggtaaatggaggaaacctggcaccggctcatgaccagcaacagcaagttaacagcaagattgcttcgttccagcagttcatagcccatgacttcgacgccagcgaccatggcacgtcaagcttccctgtcgctgctgttcataggatcggcatactagatatccggattttcaacactgacaggcacgccggcaatgtgctggtgaggaagcttaacggtggcacaggccgctttggttgccagacagagctgttcccaattgatcatggcatgtgcttgccggagaacttggaggacccttacttcgagtggatccattgggctcaggcttctattccgttctctgaggaagagctcgagtacatcagaaatcttgatccaaggaaagatgtgcagatgctgcgccgggaacttccgatgatacgtgaggcctgcctacatgtactggccctgtgcacaatcttccttaaggaggctgcagctttcggactctgcttggccgagataggcgagatgatgaccagggagttcagagggatggaggaggaaccaagccagctggaggttatgtgtatggaggccaggaagagagtagcagagtgggagcccttctctgccacagctgaacatggagaagataccgatttccagttctcggtggatatgctaggagaatacagtgatgtagtgcgatcaccaaggttcaatggctcaggttccaaggtgtccagtttcagaagccctttgtctaagctcgtcgagagcgtcgacgagggcagtgatggccatgaagatcaaaacgagtctgatcgagtcttgtatgctggatggaatacatccagcgttcctagcaaagctatgggccatagtggcaatgcctcaaaaagtgcaatgaacaggagtgccgatgaacaacttccatcaagtatgtgttttgtcaggctgtcggatatgagtgcagatgagtgggatgtattcctcgaaaaattccaggagctgctgaaagaggcactgcacgagagcgcaagggcagcagcaggtcaaaggatgaagcagcggctgggcacttcatgcaagttttgagcagggcaatagcgcatcagagaagaaaaaaatgcagtgctacttgtactgcttgcttatggagtgagtacaggatgaagatatcatcgtatgcggcaccttcaaccttgtgcaacgatctaggttgcagcagccatgtccagcaggtagataggaccacaagcatatgtagtgacggtgtggagaactgctacgcgtgtttattagctatatgtttacgaaggggaatgcttaataataaatgtttgtcagcctgtgtatattggcttgatgttagatactccagctttagcatgcaatttcttagtcgctgaaaattctttgtagcttgtgatgtgacctgtgagcagtgtaaacattgcacctttgatggaaaaataatgcttacctgttgttgaataaaaaaaaaaaaaacctgtttgcttggtctccaaaactcttccaaggcatacaggttaagtagatcacaggttggaactgttctggagcagttaaaataccagtaacatgagctcatctcgcctccagcgacagcttcacaaatgggaacaaagaaaaaatagctgcaggcctgctttgtcttccaatcagaaaggtaaccctacactgcatagtcagaaaggtgatttcaactacactgtgatgncagttacaagatgtcatcacaagaacaaatagtcattagtcgtgtcatcagtggaaagaagaatcatagagacggtggataactaaacagaacatagagagcatttagccaaggactaattctatcagcgcagattcgcttacaacatcatgcagtttcacaaatttgacagcataggttgttagataatattaagaatgtatctgtaaag

SEQ ID NO: 5043 - DNA, 910 bp, Zea mays
tttttttttttaaactgaaacgctacactttatgaaatggacatggacgtaatatataagtgtcaagtcgagctcgtgaatagagccatttcagtattgacagcaagatctcttcaattaagcattttttatccattacaatgcgccttgctcccagtatgacgaaatacagaaaacaaaaggaaagagaaaaattgaaaggtggaggaacccagtaactctgcatgtgaaaattttcttgataacaacgaaaattttcttgcctgagaattatttaccgagggtatggacctgagccccaccaaggcgcccaatatgctctacggaacctgacattcaaaaaccttcctttttcccgttttggacatgaacggaacaacccaaaattgctagtgaatcgagcttgcgtgtgacctatcaatgctctcttattctgatggtaaagaaacccaccctcgccgcagcttctctacagagaccacagcttattcacattggagaggcctatcagaactgtgtcaagtgatagaaaatttatgatgagaggatcactcccaccagctcaataaaatcagcgcccaccaccagggctcgaactgccggcacttgtaggagtctgagtttgcataatggtatcatgatggaataccccttttggcaagattgctccaacaggcgcgggtcctgccactggtgatactacatgattgatagatggatctttagttgaaatatattctggggaagacgaagatggagccaacgtggcaacggagaagctaataggatagggagcaattggcatgtcagatagtggcaaagcagatgaactgtagcctagtgtacccagggagcgaccacgcttgcatgcaactccatatctgcaatatccattttgggcatagtacgc

SEQ ID NO: 5044 - DNA, 1646 bp, Zea mays
ctcttttagagttcctagctagatatttattatctctacctttagctatttattatctcgcttttctttttttttttgtttattgcgaaatacggcatatattccgaacaaaagcatccattggcacaattaattattcatgaaaatggggaatcgaaacatagcaacagtgacacatggatcgtctggtccaatcgaagtgaggcgcgtctcactcgtcgtcggcgacgcggacgagctgctttccgacgttgcgaccgtggaagagtcctatgagcgccttgggcgcgctctcgagcccctcggcgacgtcctcgacgtaggcgagcgtgccgtccctgatgtacggcagcacccacgcctcgtactgcgggtagaggtgcttgtggtcgggctcgatgaacccctgcaggcggaggcgcttggagatgacggcggcgaggttgcgcacggcgtccttctccccgtccgccaggttgtactgcgagatgagcccgcagacggcgatccgtccgtgcacgcgcatgttgagcaggacggcgtcgagcatggcgccgccgacgttctcgaagtagatgtcgatgccgtcggggaagcagcgcttgagcgcggcgccgaggtcgggctcctccttgtagttgaaggcgtcgtggaagccgaacctggtcttgagcagctccaccttctcccgggacccggcgctgccgacgacgtggcagccggcgagcctggcgaactggcccaccagctggccgacggcgccggacgcggcggacacgaacacggtctcgcccttcttcggcgcgcagatctcgtggaagcccacgtacgcggtgagccccggcatgccgaggatgccggtgtagtaggacagcggcacgcccgccccctccccggccccgtggtgggagatcttggagaggagcctggtggcgggcggcgtcacgacgctgtagtcctcccagccggtgatgccccagacgaggtccccgggcgcgaggcgcgggtcggaggagtcgaccacgcgcgcgacgccgtagcccgtgatggtgtcgcccgggacgaaggcggccgtgtaggactcccgcagcgggcgcgacatcttgggccgcatgtaggggtcgcaggagaggtagaggttcctcacgaggacggacccggccggctcggcgcccgtcaggcggaggggaacctcggcgccccggagcagctccatgtgctcctcgcgagggtatccctccacgtactccttgaggatcacccgccggttcgtcgccgtcgtcgccatcggggcctgcttgtgctcggatctatccctctgcgactcgctgtgccgtgctctgctttcctccgctgaggatgattgagttcagtgtagtacttttgtttggatcctgcgatccgccgggggccgcaatatcccggcctgtgcaaatgcaataagtgatggtgaattattgggggacccgggcgggctgcgcagccttcaacggggcatgattagtgggtccttttggatacagatactagagatgttgcaattgaattagatataatactaaaactgtttagtactgaaaataaattttaataaaaatatcttgtttggatgtatttagaatttaattccatccaatacactaaag

SEQ ID NO: 5045 - DNA, 1900 bp, Zea mays
actgaagtattgtaaatactatagttgttttaaggcattctaaacttagctctggacctcagttttcaaaactgcggtattataaactacggtattgtcataactaaagtatagtatagtatttcaaaaactgtggttttcaaaaactttgttcccaaacagggccttacatgcgtaaccaatccgaatccatccctatagcctatgtcggtaggcggcccccctgaccgacgatgccacctcgtgttgcgatcagaggggttgttactgaccgtgtaggccgccacgctagcggtcggtacggccccgctttggcaccagtctatccccccctatgaattgtgctaatataatcaactctttcttgtgtgtgagcatcagaggaaaatagttctgtcctccatgtgctcatcgtgttatcttgagctgcagtgtttgatccgtcgatttgcttaggttaattagccactgcatagggtgtgtgattgtgttcgtgaggccagcaacatataggcctgcatctgcatggtctttgatttcacgtgatgtgtcttcgacagaacacaattgtagccgaatccaaacgtgtacgtccggcagcaacggggttgctgggccttcatgctcgtcgctcaccatcaccactcaccaaacggtgctagctagtatgccactgtccgcagtggacgacgagggctccctgtccctacccagacacacccactgcgtctctcctcgtgagctgcctaatcgggccacgtgacacagggtcacaatcgctgccagtaacaattgcaggtcactcaatccagcaaccaaacacaaaggaatatatatgtgatctggacagaacatgcaagagaataatagagatcagtaatattagcaagtgggttcacgggtatgctcacgtccaaaatccaacgacattttttaataagcggaatgtaatcgatccagacgggccagctcgagcaccacatggcgtggctccacctcgcgtccgccaccaccgctataaataccactggccatgcacacacgcactcccagcgctagcatagcagcagctcgaactagctttagctactacgtgtgcaagtgcaagcagcccactcgttcgaccatggctgcgagagcggcgctcctccagctggctgtcagcctggttatccttgccgccgtggcgagcgcgagcgcgaccaactgcccaccgccaccgctgccgccggccccaaagccgccgacgcccggcggccaccacggccacgggtcgtgccccaggaacgcgctgaagctgggcgtgtgcgccaacgtgctgggcctggtgaaggccaaggtaggctcgccgccgtacgagccgtgctgctcgctgctggacgggctcgtcgacctggaggccgccgtctgcctctgcaccgccgtcaaggccaacatcctcggcatcaaccttaacctccccatcgacctcagcctcatcctcaacaactgcggcaagaactgccccaacgacttccactgcgcgtagatcatcagtcagtcagttattgatcgtcgtccatcgccggccggccgtggttcatcgtcatcattccgttttgcttaattgttgatcgatcgtcttcttcctgtcagtcccagcagcttatttattttaaatttgtctctttatacatatatatgagtggtgtggttacacttctacatagcccaggcagcggctacgacgcgtgcgtgtatatgtctggcctggggtgatcagttaattactgatcggtgttgcgcagtagtgcagtacgtatattcttcatttgtagtcatgacgatctgtttgcatggttcgttcaataaatgaagttgacaagttgtactttctttctcaaaaaaaaaaaaaaaaaaa

SEQ ID NO: 5046 - DNA, 1170 bp, Zea mays
accactgactcgtccggcccaactgaacaccgaacctaacaggaggtgcctcttctcttcagttcttctcagtttctttcttgtgagggaggccaaacgatacaggaatacgatacgccgctcgcctgaatcgagaccaccaccgctcccgctctgcctcacctcgccgactagagtttttgccgccgcggatctcgccgtccccgccatggatacgtcgggctcctccgcagccgccggcgacgccccgaccaccggggagcaccggatggggaccaccattgtcggggtctgctacgagggtggcgtcgtcctcggcgctgattccagaaccagcactggaatgtatgtagccaaccgtgcttcagacaagattacccaattgacagacaatgtgtacgtttgtcgctctggatctgctgctgatacacaagtcatttcggactatatacgttatttcctccaccaacacacaatccagcttggacaaccagctactgttaaagttgcagctaacttgattaggttgctagcttatcagaataagaacatgttgcaagctggcatgattgttggaggatgggataagtacgagggaggccaaattttctcagtccctcttggtggaacgatcttgaagcaaccatttgcaattggaggctcaggttccagttatctttatgcacttcttgatcatgaatggaaagagggaatgagccaggaagaggcagagaaatttgtggtgaaggtagtttcccttgctatggcccgtgatggtgctagcggaggggttgtccgtacagttacaataaatgcggatggcgtgaagaggaacttctaccctggcgacaagctacccctgtggcacgacgagctggagccccagaactcgttgctcgatattcttgctgccgggaaccctgatcccatggtgcagtgaatttgccctccacttccgttgtgaacttttcactgtacctgacttgttcttgatttcaaccgaagaaagaattggaacatttcctgtcgaactaatgtcgcgccagagtatttacatactgttgttatcacaccttagtaaattcatggttactactgctgtcgtcgttttatctggcgagtatgcgattttgtcagccgcctacttatatgcggtactgatgcatgagt

SEQ ID NO: 5047 - DNA, 1036 bp, Zea mays
  misc_feature (4)..(4): n is a, c, g, or t
  misc_feature (25)..(25): n is a, c, g, or t
  misc_feature (74)..(74): n is a, c, g, or t
gcanacttatttccttctgtcctcnagccaactgtctctaactatcctcgcttcctggtgctctgcaaagaacnccattatctcctcagcagctcttctgttttttttggtaaggaagaagctgcgtggaagatggaagaaattctgctctctccgtcttgttcgaaactaactttcctatcccgcccctttgttgcatatctggcatataccatagtccatatccgtcgcatatctccaggcttttatgttcatctagcgctcctgcattgcatctagtgcccttagtcagttagcatgctcattcgttcccacttcaagttcacgaaccagtttgagggttctgattttcttaaaagcgtcgaaagagagtctggattctggatcccttcgtgcaggcaaaccctgatgaggttgctctgtaatgacataacgctcaagctagctcgtgccggtgttacacgcttctgtagccctgcgcagttttagcactagcagtgaagcagcagtactgctggatctagattagtagtcatcggaaatgccgaggtttggtcagttatcttgtgctctggtgttaaatcagcagatgacattgtgtcgttgttacttcagtaacgtgatataacggtcctatgtcgtgaaactagctcatggtgttagaactagaaaccatgttgctcagagctactgtgttgatgttgcacctgctgagcctgtcatggctgtcactccttgaggattattttggttattagttcgtcggcggagttgcggagtttcgtctctgcgtttcagataagacccttgatgagtagctagagattgcagtagtcactactgcgttgacgcgtttgctcagctcagctcgtgtgtgctaaaacccgttcgatcgctgcagtcagactcagctcgtgtgtcactctattggcgtgtcatgtaagaggtcgtttggtttgagtgaggaatgaagtgattcatctttttgtccctcctcacttttttatttggtttatggaatagaatggattgatcc

SEQ ID NO: 5048 - DNA, 2029 bp, Zea mays
aggtctagagtagagaggtccaggccttcgcccgagccccgccagccactaccaacttgggacgggcaggccggccagtgtcacatacaggcccagaagccgtcagaagacatccggccctaggctaggcgcacgggaggcagacgaggcgagaagtggcaactggtacctttggggaggcgaggaaggacacgaggtcggcgcgttcgtgcgtgcctttctcactgcacgccgatccctctctccgaaccccgccgcccgccgcagatccgagggtcatcggcagccatgatctcgtccagcaagctcaagtctgtcgacttctacaggaaaatacctagggatttgaccgaggcatcactatctggcgctggattatccatcgtagcagcattagcaatggtttttttgtttggaatggagttgagcagttacttagcagtcaatactaccacatctgtgatcgttgataggagttcagatggggagtttttacggatagatttcaatatgagctttcctgcgctttcatgtgaatttgcatcagttgatgttagtgacgtgctgggaacaaacagattgaacataacgaaaactgttcgaaagtattcaattgatcggaatttagtaccaactggatcagaattccaccctgggcctatccccattctcaataagcatggagatgatgtcgaagaggatcacgtggatggtgcattttcattgtcatctcgcaattttgatagcttttcacaccaatatcctgttttggttgtcaacttctatgctccctggtgttactggagcaatcgactgaaaccttcatgggagaagacagcaaaaataatgagggagagatatgaccctgaaatggatggtagaatccttctaggcaaggttgactgcactgaggaagttgaattgtgtaggagaaaccacatacaaggatacccatccattcgtgttttccgtaaagggtctgatataaaggagaatcagggtcaccatgatcatgaatcatactatggggaacgtgatactgagagtttagtcgcggcaatggaaacatatgttgcaaacatcccaaaagaggctcatgctttggaagacaaatccaataagactgttgatcctgcaaagcgccctgctccaatggccagtgggtgcagaatagaaggctttgtgcgtgtcaaaagggttccagggagtgttgttatctcagctcgatctggatctcactcgtttgatccatcccagataaatgtttcgcactatgtgacacagttctcatttggcaaaagactttccccaaggatgctgcatgaattcataagacttactccctatcttcgtggataccatgatagactagctggccagtcttatactgttaagcatggtgaggttaacgccaatgttactattgagcactacctacaagttgtaaagactgagcttgtaacacagaggtcctcaaaggaactgaaagtgcttgaggaatacgaatacacagcacacagcagcttggtgcacagcttctatgttcctgttgtgaaattccattttgagccttctcccatgcaggtcttggtaactgaagtcccgaaatccttctcccatttcatcacaaatgtctgcgctatcatcggtggggtcttcacggttgctggaatactggattccatctttcacaacacactcaggatggtgaagaagattgagctaggaaagaacatttaaatttcgacgccgctgcaagtttaggcggatgcactaggtagccattgttttgttataactaggtaatgactcatgaaaatcggtatatgaaagatggcgtgctgaattgacggttgaaattcggggggtcatgaaatcatcatataataactagggatctcactgtttcgctaaaccactcacaataagacagtggattgctgctagtgtgccactgtgataagtaaccgagttggataatatattcagtatattatcttgccgtgctaaaagggggggcccggtaccc

SEQ ID NO: 5049 - DNA, 1755 bp, Zea mays
  misc_feature (22)..(22): n is a, c, g, or t
accggtaacaaaacatcccggngtcgacccacgcccgcccccccccccgcccgccctcaccctcgacgccgcgctcctccgcatcgccaatatcgccgacctctcccacctcccagaccacctcctcatcgatctcttccgtgtgaaatcatatcacagtcacagccacacaggagtgtgcgggctgatgtcctcttatgcttatgctgcagaggattcaacattagaacacattttgtaatgtgctcttgcatttttattgcagagaaccctcagtgctggtaagctgacagagaaagttctcaagttgtttctagcaaccggctgtgaggatatcatattggctgttcggttgctcaacattaagcagccactcgtaccagtccttcccacaaggtgctctgagagattctagacctgctgccgttcacattgttttgattacctgagaagatgcctttggaaattcaagatagtgaggttgacattgtgattgcggcactccggcccaacctgaccactttctttgaggcatggcgaccatttttctcccgtttccacatcattgtcgtcaaagatccagacatggcagaggatcttcaaatccctgcaggttttgatctcaaggtttacaccaagtcagatattaatgggttgcttggtgcctcctcatccataaacttatctggtcactcatgccgttactttgggtatcttgtctcacgcaagaagtatgtgatttcaattgatgacaattgcctcccagcgaaggacactgctgggtcgactgttgatgttgttgcacagcacatggccaatctgaaaacacctgctacacctttctttttcaacacactctatgatccatacaggaaaggtgctgactttgtccgtggttacccattcagcctgcgcgagggggttgagtgcatgctctcgtgtggtttgtggcttcataatgctgactacgacccgatgactcatgttgtgaagagaaatcaacggaacacaacatatgtggatgctgtgatgacggttccgcttggtgccatgctgcctgtgagcgggataaatgttgcattcaaccgcgatgtgctggggcctgctatgttcccaggcctgcgtctacgaaacgaagggaagcacagatgggatacccttgaagacatatggaatggcttatgtgctaaagtagtctgcgacagcttgggatatggtgtgaagaccggactgccttatgtgatgagaagtgatgcagaagcaggtaaagctctggagagcttgaaagagtgggaaggggtaaaagtcatggatgatgttctcccattcttccagtcgctcaagctatcgaggactgcagttactgttgacgattgtgttaaggagcttgctggagttgtccgtgagaagctaggacctaagaatgcaatcttcaccaaagcagccgatgccatggtggaatggaacaatctctggaaagtgcatggtgctcagaatgcatagtttgggagtttgcatgtttcctacagagcatctaatagttgtttggagtgcgcgttttacagttctaaattttccctgtggaactcatgaagctgaaataaacaacagtcctttatgccgtgaatttggcatgaatagctgagcatctcattgtatacgcttaagaattatgtaatgtaatgcatcaaaagaacatgtgatgttttcttgcaaaaaaaaaaaaaaaaaaaaacccgcgggggcccggtaccc

SEQ ID NO: 5050 - DNA, 1319 bp, Zea mays
agtctggtaccgccggcaaagcagtcgttttcgtcctcttccttgattaaaccttccgtacccatatccacctgctgctccgaccttccagtcttctccgtaggggcttcgctccatagatttcgccgcaaggggcaacggcacacccaccaactgacctgacccacgagggatccgcagatgaagatcattccggtcccttgcctggatgacaactatgcctacttaatcgtggacgagagcaccaagaaggcagcggccgttgaccctgtggaaccggagaaggttctcaaggcggccggcgaggtcggcgcctacgtcgactgcgttctcaccacccatcaccactgggatcatgctggtggcaatgagaagatgaggctgcaggtgccagggataaaggtatttggaggatccctggacaatgtgaaaggctgcactgatcaggtggagaatggaatgaagttgtcacttgggaaggacattgagatactatgcctacacacgccttgccacactaaaggtcatatcagctactatgttactagtaaggagggtgaagatccagcggtcttcaccggagataccttgttcattgctgggtgtgggaagttttttgagggttctgcagagcaaatgtatcagtcccttattgttacactgggttcgctgccaaagtcaacccgagtttactgtgggcatgagtacactgtgaagaacctaaaattcatgctgacactggagccagagaatgagaagacgaaacagaaactggaatgggctgaaaagcagcgcgaagcgaatcagccaacagtgccctcgactataggagacgagtttgagataaatactttcatgcgtgttgatctaccagaaatacaggcgaaattcagtgtcaactctccagttgaagcaatgagagaggtcaggaagaccaaggataattggagaggttgaggacacccatggccgccactagtctgttgaaccagcattccaaagtgaactaatgcagaaaccttgccctgtaggtgggaatgaggtttactgccgtgcaatgctttgagaaatgtgttgttgtgaaggagaagactcctacaataagctccgcgttaatgagtagtaacaatacgctccttgtaacttgtggtctgtttgccaataataatgtacgaactgtagtgcctatcttgaaaatatgaagagctataatgggtataacctgcctgcattttatatttattcagggatcatcagtatatggattatgatcgatgcatacagatgataaagatggatgagctgctatgctttcactg

SEQ ID NO: 5051 - DNA, 2545 bp, Zea mays
cccacgcgtccgaacgtcttgtaattcagcttgggaagaagatggttgagatgactggtgacttcactccagatgtgatggccctattgtcagctgacatcatcatttctacccctgaaaaatgggatgggattagtcgaaattggcatagcagaagttacgttatgaaggtcgggctcatgatattggatgagatacatcttctgggagctgaccgtggacccatccttgaggtcattgtatcaagaatgcgatacatatcatcacaaacagaacgttcaattcggtttgttggtttatcaacggcattagcaaatgctcgtgatttagctgattggttgggcgttacagatgacggtctattcaatttcaagcctagtgtgagacctgtacctcttgaagtgcatatccagggatatcctgggaaattctattgtccaagaatgaatagcatgaacaaaccagcttatgcagccatatgcactcattcacccagtaaaccaggtctcatttttgtgtcatcacgtcgacagacaagacttacagctcttgatatcattcagcttgcagcatcagatgaaaaaccaaggcagttcctgagcattgaagacaactccctagacatggttctttcacaggtttctgacagtaatttgaggcatactctgcaatttggcataggtctgcatcatgctggtttaaatgacagagacagatccttggttgaggagcttttttcaaacaataagattcatgtgctggtatgtaccagcacattggcgtggggtgtcaatcttccagctcacctggtcataatcaagggcactgaatactatgatgggaaaacaaaaagatacatagattatgatatcacagatattctgcagatgatgggtcgtgcaggtcggccgcaatacgaccaacatggcaaagctgttattcttgtccatgaaccaaaaaagagcttttacaagaagttcctctacgaaccgtttcctgtggaaagtaatctgagggagcacttgcatgaccacataaatgcagaaattgtttctggcaccatcagcaacaaggaggaggcgattatttatctcacctggacttacctatatcgcagattggttgttaatccggcctattatggattggaggatactgaaacaaacacattgaattcttatctatcaaggttagtcgaaactacatttgaagatcttgaggacagtggatgcataaaagtggatgaccactctgtaaagtacttgattttggggaaaatagcttcacagtattacctgagctacctcactgtttcaatgtttgggtcaaatattggccccaacacaacgttggaagtctttctacacatactgtcagctgcatcagaatttgatgagcttcctgtacggcacaatgaggacaatttgaatcgaatactcagcggaaatgtcccgtatccagttgatcaacaccaccttgatgatccacatgttaaagccaacttactctttcaggcacatttctccagagcagaattgccaataagcgactatgtcactgacttgaaatcagttcttgatcagagcatacgcatcatacaggcaatgattgatgtatgcgcgaatagtggatggcttacgagtgcattgacttgcatgcatctcttgcagatgatcatacagggtctctggtttgagagagattatgaatccctctggatgttgccatccatgaatgatgatatattagaccatctcaagagtagaggagtctcaacagtcccctccttactagatctttcccgtgaagaattgcgtagggtacttcaaccattttctgcgtcagagttgtatcaggatctgcaacatttccctcatgttgatgtgaaagttaagcttcataatgaacaggagcgatccaaacctccaactttaaacatcaggttgcaattgaaaaattcgcgacggtcagcatcaagagcatttgcccctagatttcccaaggcaaaacaagaagcttggtggctggtcctggggaatgctacaagttcagagctgtatggtctgaaaagaattagttttgcagatcgggtgattaatactcgcatggaattgccacagacgttcaatgtgcaggagacgaagctgatcttggtgtcggattgctacctaggttttgacttggagtattctcttgagcatctcaccaagggttgagtgctttattcagagctgtttgggctgtttcattttctatgggttcagcaaccagctcatcctagattgatcctgtaatcacgagacatgagttcattccatgaatttttgtttgtatgactacatccctcgtgttcatggttatattatatttaatagctatatatacgagtggataggtttataactttcatgaaatatcttttccgtaagcatagtagatgtttgagctctaaggttatgaccaacaaattgtgtatatggtcgtgcaaaatactattttataatataaactatattatttacatggtgaagtttgagagggcggc

SEQ ID NO: 5052 - DNA, 1748 bp, Zea mays
cattgggtacctcgaggccggccggggcaacactctcctcccgggcctcccccgccgaaaaaaacatctcctttgtatcggcctcggcaatcctgaccggatcaacaaagacgtagctaccccctcccgcgtccgtcgaattcgcctccgccgcctgctcgatccggtgggaattcgccgctgccgggttgttttcgctggggtgattaaggctcgggattcgagatctacgcgagtcgcgggcaagcagccatgagcgaggtgttcgagggctacgagcggcagtactgcgaggcctccgcctcgctctcccgcaagtgcaccgctgcctccgccctcgatggggagaagaagaagcagaagctgtccgagatccaatccggcgttgaggaagctgaatcgctgattcgtaagatggacctggaggcaaggaacctacagcctagcattaaggctggtttgcttgcaaagctgagggagtataaatctgacctcaacaacgtcaagagtgagcttaagaggatctcagcgcccaatgctaggcaggctacccgggaggagctcctggagtctggaatggctgatactctcgcggtgtctactgatcagagggggagattgatgatgacaactgaaagactgaatcagtcaactgacagaattaaagagagccgaagaactatgttggagacagaagagcttggtgtgtcaattcttcaggaccttcaccaacagcgacagtcactactacatgctcatactactttgcacggagttgatgacaacattggcaagagcaagaagatcctggctgcaatgtcaaagaggatggataggaacaagtggatcattgggggaattatcacggctctcgttctggccatccttctcatactctacttcaagctcgctaattaagcctctgcctgcaggtaggtcccccctacatatctgtgttcagtaattgtgtgatatgagttgtctgaatgccgtgtattgagcaacacgcagctctccgagcgtcatttgttccccctcaaacctgtaaactcaaaatggcttattctgtgtatagtctgttattcccaactatgtaaaatgtctaaagagtaaaaaaaataatacttggtgttgagtctcatgtgcacatcgcacgttgttctgtcatgttaaactagagtggttactagagcagtatgtactacctctgtcccaaaacaaatcaacttctaaagttgtcatccctaagtcaaactattttaagttcgattaaatttatagaaaataccagtgtttgtaataccaaattagcatagttagatccatcactaagtatattttttataatgtatttatgtagttctatagacgttgttagttggtctttcctataaattaaatttggtgaagcctaagatagtttgactataggtgattataggtttactttgggaaggaagtagtagtaactattgtgtgtgcatcagcctatttgaactgctgtcgctgtctgccttggaattattgtgattaggcagctctgcggctagtctgttatggttgtcgtgctagtgtttgtgcagatgcttcctgaatgattgagtggtagaataggtgggccttggcagctagctagcgtgcatgcgcagaaggtgcaggtctatcggtgctgcagtaacttgagtcgcagagctaggttggcatgcaatgcaagtgggctaagcgatgaggcaggcgcatcttgtgca

SEQ ID NO: 5053 - DNA, 1861 bp, Zea mays
gctgggaggtggcttcagctacggcgacctagctcaacatgggccactagagcagagaccaccagttgtactcttcatttaagtctcaccagaatgtacgagacgagttgttcatcatcaacaatcttctttgcaaataccatctcttctgcaagagagattatcttgacaatatattctagtgtcgatggactgtatatttatacaggcaggagccgactattacaagaagaattctactcgttacaacatactaaccaactaaataaactggacacatgcaattctgttttggtcttatttgtaatctataattagagctggttttttatctagcccaagagaatcctgggcaactaaggttgtagcctatgtatagcatattctaacagatggtttgcctgcaaatgccattactcagcactttgcattcttttttggccgtttccatcttttttttcttctatcagtcatcttttctgatttatgcaggtaagcggcatagtaagaaatatcgtgagagattggggtgatgagggtcaaaaggaacgtgatgagtgctataagcccattcttgaggagcttaatcgcctttttcctaaccggagcgatcagaggcctccttcatgtcttgtccctggtgctgggcttgggagattggctcttgatatatcttctctgggttttgtaagccaagggaatgaattctcatattacatgctgatctgttcaaatttcatcctgaaccacactcaagaagctaatgagtggtccatatatccttggatacatagcaactgcaattctctttctgacaacgatcaacttcgtcctgtttcatttcctgacattcatccctcaagtgcaggtatcacagagggattttcaatgtgcgctggggactttgtagaggtctacagcgaggaaagccaagaatctgcatgggatgctgttgtaacttgctttttcctggatacggcacacaatatcgttgaatacatcgagatcatatcaaaagttctcaaggatggtggggtctggattaatttgggtccccttctgtatcactttgctgattcatatgggccagatgatgatatgtctattgaattaagtttggaagatgtgaaaaaggttgcttaccattatggatttacaatggaggtgagggtttctgcattaaatctattttttttaaagagttgttgtgatagcatacttcgatatgtgatttgcaggtggagaaaatgatcgagactacttacactgcaaacatgaaagcaatgatgcagaatcggtaccgtgcagcattctggacaatgaggaaagatgcatctcggtcaaaagcttgtaagcctcgttgaagtgaagatcatccatggcggacgatcaatttgtgccatcattattcactgttgtattcaaactccacacaggccgtgccagactaagttagatagatatatcagatgagctgcctgattcacagaatataattggcttaacataggaaaggaggtgctgagccacgctagctagctcatccttttctcctatatcacagatattcaaactgtactatgaactctgtaagaatgagcaataaactaagcagacagaagttaaaaatagaagtaacagaaatttaaaaaaaaaaaaaagtggcgccgttgccggggatcccgggtcgcccgcgtgacaggcgggagtctcaccactgtaacgactgggatgcctagggtttagtggatgtattgttccacgactaatgtttagtattggaagtatgatatatagtgtaattataaaactaatcgtatgaaggaggaaagataaacgaattgatcaagtctaaaaactt

SEQ ID NO: 5054 - DNA, 1872 bp, Zea mays
atccccctgcactaccattggattaaggctaggaactattcgtgactaatccatgttaatacaaataaacaaaacaattctgcgggaacgaactcaacaaaaccgtttcataataaatgaacaaaaatggtagattgaactgtttacaaagtggaatttgaaataatgattgggatagaggatgagatagagagtgttggagatagtattaagtacttgtgacgcaccagtatatatatgtatgcatatataataattaatatatacaattaataaaaaaaagttaaagaaaatcagtgccggattagattgcaacggcaaatcgcatcacatgtccaacaaaaatatctggaactgtacgacattccatgatgacccgctgcgtgccgcccggccggggcctccctgtttcctttcctttttgcattcccacccacccatcccctcaaaattcgcagcgtgtctcttcctccatcgcagcgtgtctcgtgctccccccaggctcctcttcctcgctttccctccaccccgggcgcaaaccctaaccctaccgtcgctcgccccgcggcgtctgccaatggcgcgccccgtgtgagtgtgcgcgagagaggggtagaccttgaggccgctacccggggaggagagcgagagatgtataaacaggggggagcggggggaggggctgggctggaccggaagcggatcaacgacgcgctggataagcatctcgagaaggcggtcgcgtcgccgtccacgtcgagggggtcggcgggcggcgggcgcgaccaccaccgcctcgtcgtgccgtcctccgtgtcgtccatccccaagggccgctgctccgaaggggagtctgattctgatagtgaagcatcggatgttagcggctctgatggagaagacacctcatggatttcatggtattgcaacttaagagggaatgagttcttctgtgaagtcgacgatgattatattcaagacgacttcaacctttgtggtctcagcagccaagttccttattatgattatgctctcgatctcattttagatatcgagtcatctcatggtgatatgttcactgaggaacaaaatgagctcgtagaatcagctgcagagatgctttatggtctgatacatgcacgatacattctgaccagtaaaggactggctgcaatgctggagaagtataagaactatgactttgggcggtgcccgcgtgtttactgctgtggtcaaccatgcctgccagttggacaatcagacatccatcgatctagtaccgtgaagatatactgccccaagtgtgaagacatctactacccacggtccaagtaccaaggcaacatcgacggcgcatactttgggacaacgttccctcatctgttcctgatgacatacgagcacctcaagccacagaagctctcgcagcgctatgttcctcgtgtctttggcttcaagctccacaagccatgaacctcatgtatttgtcttttaaactcctcaaaacgtggcactgggggcatgcgggagttttgcaatccttgaagacttgcatataagagcgccattggcaggtcagtggattggtaaaattctatcatgctgcagcgtgcttgtaccttagctggctggcacctatccaacatttgaatgtagctctaaggatatcaatgttgtaacctaactgctattgttctttgattagtaaaccaggagccccccctacaatgtagaatatggcaattatttatggctttgcagaaaataacaacccttcatctgcttggttctcgtaagatggccctttaattttgtagtttgcgaacttctattttgaaatgtgatttgcaaaggtgcgtcatctcaaaaaaa

SEQ ID NO: 5055 - DNA, 2852 bp, Zea mays
gtttctatatttggcaattttggaactaaattggaataaaatctagggactaaacattagtccctaaaaaccaaacacctcctaattattttgctcaattctagctatagctttaccccaaaccgaaagtggcatccgaaagatcaatttattttgcactccgctgttatatcgacgtgcaccaccgtcttgccgtcgctcatttcctcctcgctcggctgcttgcctagggtttcacctgctaccgccccacctccagccgtcgcttcagatcccgccgctgccggcgctcgatcctacttcgttgctcctagctgatcccgctgagctcggatttgggcccttcctcaccgccggaacagcgtccggacgcgcgggggcagatctgggttttggtggcccgcttggtgtatgagaaggcctccagagcttggaagtaatggaggtggagccggcgaggagggacgctgcagcgctggacccggagctgctgcagctggcggagctcgcgccgggcgcgcttcgtgagaactccatagctgatgagctgtattcgcagtggctcgtgctacccgagacgaccaagctggtgaagtctttgattgatgatgcaaagactggtgctgtgcttaatgttgctggaagctctgctagcacaaatgctgcttcaagtagttctctaccttcgatgtttcctgctggtagtgctccaccactttctcctaggagcacgtctggttcccctcgtgttataagacgaggatctggagctggaccatcatccttgggttctccattaaaattagttagtgaaccagtaagagaagttatacctcagttttacttcaagaatgggcgtcctcccacaaaagatttgaaggagcagtgcttatcaagaacagatcacctattttttggtggtggcggacttcaagttcaagaattcagatcggtcacgaaggacatatgtaaacttccttcattcttgtctagtgtccttttcaagaaaatcgatgttgaatgcactagaactgtctcaagggatgcatttgttgagtactggattaacgacaataaggttacaatggatatggctagtcaaatatttgaaatattaagaaagccaggttacacatatctcacccaggatgatttcaagcctgtcctgaaagaactactggcaacacaccctggcttagagtttttacaagggacccccgagtttcaggagagatatgcggagactgtaatatacagaatcttttactccataaatagatctgggaatggtcatctgactctgagagagctcaaacgtggaaatttaattgctgcacttcagcagttagatgaggaagaagatatcaacaaagtgttgagatatttctcatatgaacacttttatgtgatctactgcaaattctgggagctggatgcagaccacgattttttgattgataaggaaaatctcatcaaatatgggaaccattcgttgacctatagaatagttgatagaattttcgcacagatcccaaggaaattcacaagcatgacagaaggaaagatgggttatgaagactttgtttactttatattatcagaggaagacaaatcatctgagcctagtcttgaatactggtttaagtgcatcgatcttgatggtaatggtattttaactttcaatgaaatgcaatttttctacgaggagcaattgcaccgaatggagtgcatggcacaagagcctgtgctttttctggacatattatgccagatgattgatatgattggaccagagaatgagagctatttaactctacgggacttaaaacggtgtaaactctcaggaaacatattcaatattcttttcaatctcaacaagttcatggcgtttgaaactcgtgatccattcctcattcgccaggaacgtgaaaatccaactctaactgagtgggaccggtttgcacatagagaatatattagattgtccatggaagaagatggtgaggatgcttcaaatggaagtggtgatgtgtgggacgaatcacttgaggctccattctgaatggcgtcttgctgcatgaatttggttggacatggatgattatggttgtgaagcggaaggattgtaaatttggtggctaccctgttgaggccattgtaggctcacagcagattcagtaacatcaaaggctactgaaaagttttactgtgcagatctgattcaatatttgtcagttatcttgttgggcaaacatttttgctttgctggaaaattggggagggaggttggtgggggcgccctgcagtttcaaggcaacaacctcagcagtcatcaacggtcgactccatttgtgttctgattgatccttagggggatatctgttattcaattgtgcgcaaattttggggctgaactgttaatgtttggctgctatttctttgttaaatcttggaagcgcaggctaccaattccatcacacaactaagatcatggcatgtagctttcaggttctgctttctcatcagcatggtgttctgtagttgtgttgccattcttggtgcatcttgggaggaatgatccgtgaccttgaagcatggatacttgtcattttgtaacattaccgagaagcagtggattgggtgcatagtaacacaggttgtaacgttaccgagaagctgtggattgggtccaatttttgttaaggtgtaaatttggagaatattttaggttatcttacttgaaagtgctttgcgctttgcgtattgagctacttatgtcgtgatgcgctgaaactccatgtgtgtattcttgttgtattttccattttgtcaaggatcatgttttcttgcct

SEQ ID NO: 5056 - DNA, 1235 bp, Zea mays
cattggggaccctcgaggccggccggggcccccggcggctctcggaatagagtggcctccctctttttcctcgcactccgcaagacgcaagaccacctcaccagcctcctcgtccccgatctcctcccacccgcatccaagggtttccttctcgaccgtgcggaacgagccagagaacaggtatggcggcggcgcggcacctcagatccggcctccccctcctccgcgcccacctcgcatcctccgaatccgcggccgtcgctcaggtttcgaggggcttcgcgtcgcaggccgccaagcccaccgggaaggagatcaaggttccaaaggctctgtttggcggcacaggcaactatgccagtgcactgttcctcacagcagctaaatctaatgcattggacaaagttgaatctgagattaaagctattgtagaggcttccaagaagagcccgttgttttctcaattcataaaggacttgtcagttccaaaagcgaccagggtgaaggctatagccgaaatatttgctgacgctgggttttcagatgttacaaagaatttcttggctgtcctggcggacaatggcaggctgaaatatattgaacgcattgcggagagatttgttgatttgactatggaacataagggggagatgaaggttgtggtcaggacagttatttcactcaccaaggaggaggagaaagaactcaaggaaaccttgcaggatatccttggggaaaacaaaactattttggttgaacagaagattgactacagcatcatgggaggattagtgattgaattcgggcagaaggtgcttgatatctcaatcaggaacagggcgaagcaaatggaggcgttcttgaggcaaccacttgacttctaacagccttttggataaaagaagcatcatcggaatgcagaggctgtcctgttgaaggttttcctgtgtctgcaattttaatctggccttttgaataaaatgtttcctctaacaagtgaagggcactgtttttattgtctcgtgggccacagatgcctgctgaacaatttatgttcatttcttcttttcttaaagaagcatgcactaagaacatgaaggatgcatgccatggaaagtttttgaaagtcattgaaacgtatgagctcctcatgcaatgcattattctccttatattcaaggatataaatgaaaatccagcgattgcaaacgaaaaaagaaaaaaaaaaagcggcc

SEQ ID NO: 5057 - DNA, 2425 bp, Zea mays
gccggccgggtctcgataactgccctgccctctctcccatcaccaccgcctgcgactgcgagctcaaagacccacccacactgagctgcccaaatccacattcccatcggcgcagacggccgggaggaggatgtccatgccggagacgttcaccctgaaggtgggggaggcgacgccggccgccgccggcaggccgtcggccgggcccgtgtaccggagcatctacgccaaggacggcctcatggacctcccacaggacatccagtccccttgggacttgttcagtggggcagtcaagaagtaccccacgaacaggatggtcgggcagcgtcaggttacagatggcaaggccggtgagtatgtgtggcaaacgtacgaggaagtgtgccagaaggtcatgaggattggatcagcgatcagaagcctgggcgtagagccgggagctcactgtggcatatatggatccaactgcccggaatgggttatggccatgcaggcatgtaacagtcaagggatatgttatgtgccactgtatgacaccctcggagctaaagctgttgaattcatcatgtaccatgctgagatatccattgcctttgtccaggagagcaagatcaaatcaatactagcagttctccctaagtgcacagcgcaccttagagccattgttagtttcggagattttgcaagcgagatgaaagcggaagctgagagattgggcgtctcctgcttttcttgggaagagttttcttcaatgggaaaacaagactaccaacttcccaataaacgtaaggaagatatctgtacaatcatgtataccagcggaacaactggagatcccaaaggtgtgataatcacaaacaaagctatcgttgctggtgttatgaccacagaacacctcctcaaagagaccgataaagtgatcacagaagaggattcctacttttcctaccttccattagcacatatatttgatcaagtaattgagaactactgtatttctaaaggagcctccatcggattctggcaaggggacattaggtacctgatggaggatgtgcaagtgatgaaaccgacaatattctgtggtgttcctcgtgtttatgatcgtatatatacaggtataaacatgaaaattcagtctggagggatgatagccagacacctttttcagtatgcctacaactacaaacttgccaatatgaggaaagggctgaaacagcatgaagcatcaccgtttttcgacaagatagttttcagcaaaataaaggaagggcttggagggcgtatacgtctcatgatagctggagcagcacctttgccagggcaaatcgaagaattcatgcgggtaaccacctgcagcgttgtagtacaaggatatgggctcactgagagttgtgcaggatgcttcacgtcaatcgccaacattttctcaatgattggaacagtcggccctcctgtcacaacaatagaagcacggctggagtcggtccctgaaatgggctacgacgcactgtcagacacgccccggggcgagatctgcttgaggggccacaccatgttctccgggtactacaagcgccctagcctcactgaagaagtgttctcagatggctggttccatacaggtgatatcggggagtggcaatccaatggcacgatgaagatcatcgacagaaagaagaacatcttcaagctgtcccagggggagtatgtggcagttgaggtcctggaaagagcatacctgcagtcaccccttgtggcatcggtctgggtctacgggaacagcttcgagtcgttcctcgttgccgtggctgtccctgagaggcaggctctcgaggaatgggcagcagccaacagcaaggccggcgactttgcagagctgtgcgctgatcccaaggcgaggacctacgttcgggatcagctgaaccaaactgggaagaaacttgggttgagaggcttcgagatgctgaaagcagtctacctggagccggtgcctttcagcatcgagaaggacctcgtcactccaacctttaagctcaagagaccccagctgctcaagtattacaaggatcgggtcgaccaaatgtacaaggatgccaaggaggggagagctgcgccatgagcccatgacggcattgccaatttgccacgagtggctatgatcctgagcattgtgattcctcgaaagcgtgtacatattgattatcacaatttgtaagtttaaggcatgtgtgttctatgccaaaatgtcagcagaaaatgaattggctaagaagctcgtgaatcgtgatagcttacattaataaatttattaagctagtccattaccttcacactcctcacttttttgttttggccccgtttgtggaatagaagatgagtttatccaacaaaaaaaaaaaaaaaaaaggcccctagggcc

SEQ ID NO: 5058 - DNA, 2202 bp, Zea mays
  misc_feature (1879)..(1985): n is a, c, g, or t
  misc_feature (2054)..(2058): n is a, c, g, or t
  misc_feature (2075)..(2079): n is a, c, g, or t
  misc_feature (2083)..(2087): n is a, c, g, or t
  misc_feature (2101)..(2105): n is a, c, g, or t
  misc_feature (2109)..(2115): n is a, c, g, or t
  misc_feature (2132)..(2176): n is a, c, g, or t
tacgggggccccctcggacccggcccgggacttcaggttcttcccccgatcttccccgctcagcttcgcgtaattgcatttaagcccctttggcactcattgccgtccccctcggctccatttcttggaggtgaccgcagctctccggcggaaggcggcgcagatggcttccgcggcgacacagtgcttcagctactcctcgttgccggccacgtgggctctgcggcagcggggcggcggtgccagcgtgctccggctctcttcccggcggaccttctcggtctccgcggcggccgggttcgacaaccagaaccgcgagtatgtgatcgtcgggggagggaacgctgcgggttacgccgccaggacgttcgtggagcatggcatggctgacggccgcctttgcatcgtctccaaggagccagttccaccatacgagcggccagccttgaccaaaggctatctttttcctccggacaagaaaccggctcgcctacctggtttccatacatgcgttggatctggtggacagcgacagactgctgaatggtacaaggagaatggtatagaggtgctgtatgaggatccagttgtagcatttgatggcaaaacgcaaaccttaaagacttcatcggggaaagttctgaaatacggctcacttattatttctactggatgtgaagcatcgagattacctgagaaaattggagggaaattacctggagttcactacatacgggatgttgctgatgctgatgctctagtatcctcattgggaagtgcaaagaaggtggtggttattggtgggggctatattggcatggaggtagctgcagcagcttgtggctggaatcttgacacaacgattatattcccagaggaccacattatgccaagattatttacgccctcgcttgctaagaagtatgaggaactgtatcagcaaaatggtgtcaaattcataaagggagctcttatcgaaaaacttggagctggctctgatggaagggtgtcttctgcagtacttaaggatggatctgtagttgaagctgatacagtaattgttggtataggagcaaaaccagttgtcagcccgtttgaagctgttggagttaaccctaaagttggtggaatagaggttgattccttgttcagaactagtgtacctggcatctttgcaattggagatgtagcagcgttccccctgaagatgtacaatagaattgctcgagtggaacatgtggatcatgctcggaagtccgcacaccactgtatagagacgctcctaacatcccagacaaaagcgtatgactaccttccatacttctactcgagggtttttgagtacgagggaagttcgaggaaagtctggtggcagttttatggcgacaatgtcggcgaagcagtcgaagtagggaactttgatccaaaggttgcgactttctggatcgactctgatagccggctgaagggtgttttcctcgagagtggaacctcagaggaattctcgcttcttccgcagctcgccaaatctcagcctgttgttgacaagtcaaagctccaggccgcgacttctgttgaagatgcattagagattgcaagaagctcactccggtccagcgccacggtttagatctcagaatctagtactttcttgaacccaaggctgtgcgctgctcgagcggttcatagcgtcgagaccacgtcagcaataacgcacaattacatagaatctattcccactggggttgtaacattcttcagtgcacctgggtcggccatttccagcttgaaataaacctggttgccctttgaggggttgatgaggatgatagattgaagcctttatgctacttttttaaaaaaaaaaaaaaaaccacannnnnnnnnnnnnnnnnnnnnnnnnnnnnnnnnnnnnnnnnnnnnnnnnnnnnnnnnnnnnnnnnnnnnnnnnnnnnnnnnnnnnnnnnnnnnnnnnnnnnnnnnnnttatttacccgtgaatgcaacgtcaaaccccttcaaaagggccaccaaaattcaattcacgggccgtcnnnnnaaaaccccgggacgggnnnnncccnnnnntaccccaatttaannnnnttgnnnnnnntccccttttcgcaagtnnnnnnnnnnnnnnnnnnnnnnnnnnnnnnnnnnnnnnnnnnnnntttccccaccctgaaggggaaagggg

SEQ ID NO: 5059 - DNA, 4472 bp, Zea mays
ctagcataatccatcgttaccagagatggaaatggcggcgacttctgcggagacaacaacccagatgacgctagactactttccactctcggatccctgactaccactcgtcaggcgtccccgcctgcagtgcgggtctaatctagccccgcgaattccccaattttcgccgctccaattcgctcatccgtccgcgcgcccctcgccgaccggccggcgcggcgccggccggcgtcctctctccggggtagtcagtcgcgcactgcgcatcgctgttgttccttccggttcctttcgcgtccccccttcggagcagggcaacgtccaagagatattatcgctgccgctgccccgcgcgggccgctcgctgtcccactcgtgcgccacgcctcggactcggaggtgtattccctcttctccccccgtgcttatccgcgacggaatccaatcccttcgctcaagtccttctcctaagcaaagccccctcgcttttggcgtatgcccccgctggcgcgcccatgattcccgccgattcctccgcccgttcagtccagcaacccttgctgctgcagtgctgcggctagttcggtggcggggaaggaggaggaggcgagatcttggagtggggcgaagcggagatgtcgttgccgtcgaacaaccggaggacgtgctcccggagcagctctgcgcggtccaagcacagcgcgcgggtggtggcacagacgcccgtggacgcgcagctgcacgccgagttcgagggctcccagcgccacttcgactactcctcgtcggtgggcgccgccaaccgcccgtcggcaagcaccagcaccgtctccacctacctccagaacatgcagcggggccgctacatccagcccttcggctgcctgctcgccgtccacccggacaccttcgcgctgctcgcctacagcgagaacgcgcccgagatgctcgacctcacgccacacgccgtccccaccatcgaccagcgggatgcgctcggcatcggcgtcgatgtgcgcacgctcttccgctcgcagagctccgtcgcgcttcacaaggccgccgccttcggggaggtcaacctactcaaccccatcctcgtgcacgccaggacgtcggggaagcccttctacgccatattgcaccggatcgacgtcggccttgtcatcgaccttgagccggtcaacccagccgacgtgccagtcaccgccgcgggcgcgctcaagtcgtacaagctcgctgccaaggccatctccaggctgcagtcgctgcccagcgggaacctgtcgttgctgtgcgatgtgcttgtccgtgaggtgagcgagctcacgggctatgaccgggtcatggcctacaagttccatgaggatgagcatggcgaggtcatttccgaatgcaggaggtccgatctggagccgtatcttggactgcactacccagccaccgacatcccgcaggcgtccaggttcctgtttatgaagaacaaagtgcggatgatatgtgattgctgtgccactccagtgaaggtcattcaggatgatagcctagcacaacctctcagcctctgtggttccacactcagggcttcccatggttgccatgcacagtacatggcaaacatgggttctgttgcatcacttgcgatgtcagtcactataaacgaggatgaggaggaagatggggataccgggagtgaccaacaaccgaaaggcaggaagctgtgggggcttgtcgtctgccatcatacaagcccgaggttcgtccctttcccactaaggtatgcttgtgagtttctcttgcaagtatttggcatacagctcaacaaggaggtggaattggctgctcaggcaaaggagaggcacatcctcagaacgcaaacccttctttgtgatatgctcctgcgggatgctcctgttgggatatttactcggtcacctaatgtgatggatctagtaaagtgcgatggagctgcattgtattaccagaaccagcttttggtgcttggatcaacaccctctgagtcagagataaagagcattgcaacatggctgcaggataatcatgatggttcaactgggctgagtactgacagcttagtggaagcgggttatcctggtgctgttgcacttcgtgaagttgtgtgtggcatggcggccataaagatctcttccaaagattttatcttctggttccgatcgcacacaacaaaggagatcaagtggggtggggctaagcatgaaccggttgatgcagatgacgatggcaggaggatgcatccacgatcttcattcaaggccttcttggaggtggttaaatggagaagtgttccctgggaagatgttgaaatggatgctatccattctttgcagttaatattacgtggctccctgccagatgaagatgccaacagaaacaatgtaaggtccattgtaaaagctccatctgatgatatgaagaagatacaggggctacttgaactgagaacagttacaaatgagatggtccgcttaattgagacagcaactgcccctgtcttggctgtcgacattgccggtaacataaatggatggaacaataaagctgcagaactaacaggtttacctgtaatggaagccatagggaggcccctgatagatcttgttgttactgattctatagaagtggttaagcagattttggactcagctttacaaggaattgaagagcaaaatatggaaatcaagcttaaaacattccatgaacatgaatgcaatggtccagtaatcttgaaggttaactcctgctgtagtcgggacctttcagagaaagtcattggagtttgctttgtagcacaagatttgaccaggcagaagatgattatggataagtatactaggatacaaggagactatgttgccatagtaaagaaccccactgagctcatccctcccatatttatgatcaatgatcttggttcctgcttagagtggaataaagctatgcagaagattaccggtataaagagggaagatgcgataaacaaattgttaattggggaggtcttcacgcttcatgattatggctgtagggtgaaagatcatgcaactctaacgaaacttagcatactgatgaatgcagtgatttctggtcaggatcctgagaagctcttttttggtttcttcgacacagatgggaagtatattgaatccttgctgacagtgaacaagaggacagatgctgagggtaagatcactggtgctctttgctttctgcatgtggccagtccagagcttcagcatgctctccaggtgcagaaaatgtcggaacaagctgcgacaaacagctttaaggaattaacttacattcgtcaagaattaaggaacccactcaatggtatgcaatttacttgtaacttattgaagccttctgaattgacagaggaacagcggcaacttctttcatctaatgttctctgtcaggaccagctgaaaaagattttacatgacactgatcttgaaagcattgaacagtgctatatggagatgaacacagtagagttcaaccttgagcaagctctgaatacggttctgatgcaaggcattcctttgggcaaggaaaaacagatttcaattgaacgtaattggcctgtggaagtatcatgcatgtacctttatggggacaatttaaggcttcagcagatcctagcagactatctagcatgcgcccttcaattcacacaaactgctgaaggacctatcgtgctccaggtcatgtctaagaaggaaaacattggatctggcatgcagattgctcatttggagttcaggattgtccatccagctccaggcgttccagaggccctgatacaggagatgttccagcacaacccaggggtgtccagggagggcctcggcctgtacataagccagaagctggtgaaaacgatgagcggcacggtacagtaccttcgagaagccgacacctcgtcgttcatcatcctgatggagttcccagtcgcccagctcagcagcaagcggtccaagccttcgacgagtaaattctgaccctcatgctcctggaactgcagcgagtgttcggccgtgtcgaagtctcggttgtagctagccaagtggctgctactgaaacatcggttggtcggttctggtatctagcacggcctgtgtagtgcggatagatttggttgtttggctttggagagataagctagctggctaggtgtaacgtaacgtcgaccgataactgtatgtgaatgatgatgagctgtgaggacgaataaaggcttcacttgtgttctctattgctcttcttagagtatgatggccaacagctgtacaggaaagcatccacctaaatctgggctcgctgaatgacggctaaaagttgtttggtggctttgtaatcccttacagtcgaatgttggtctttaaactgtcagttaaatgctagtacggcggtaggtctgttttctt

SEQ ID NO: 5060 - DNA, 3192 bp, Zea mays
gccggcagcgacgtcatcgtcctcggcacctcccgcggctggctcgtccgccacgacttctccttcgaggacgcccacgatctcgacctcgggagcggccgttctggcgaccactcggtgcaccgagtgttcctggatcccggcggcaagcactgcgtcgccacggtagtccaccccggcggcgcagagacgtactaccaccacgcaaggtggccgcgacccaagctcctcccccgcctccggggcctccttgtcaatgcggtcgcctggaaccgccggcccgtcgcggaagcatcaaccaaggaggttatcctgggtactgagagcggccaaatctttgagatggccgtggacgaggctgacaaaagggagaagtatgtgaagccactcttcgagctcactgagcaaagagaaggcatcaaggacctgcagatggagactgctgtggttggaaattccacaagatactatgtgatggccgtcactccgacacgactttactcttttactggcattggttcactagaaactgtttttgctagttattctgatcgggccatacactttatggagctcccaggagagatacctaatagtgaactacatttctttatcaaacaaagaagggctaaacactttggatggctttctggatctggaatctatcatggtgaactgaattttggagcacaacacagctctaccagtggagatgagaactttgtggagaacaagggtttttttgactattcaaaattgggggattccggaattaaaccaaggtcatttgcattgtctgaattccattttctgcttctgattggggacaagattaaggtagtgaacagaataagtcagcagatggtggaggaacttgtaggtgatgatacacccggaacttcaagaggaataattggcctctgtagtgatccatctacaggacttttctatgcatatgatgaaagttctatattccaggtttccacttcagacgagggttgtgacatgtggcaagtttacttggatatgaatcattatgctgctgctttatcccattgccgtaatccgctccggcggccccccccccccccagttcaggctgatgctgcatttgctgcaaaagagtattacatagcagcatccttctatgcaaagataaattacatcctgtcgtttgaggagatcagcctgaaatttatatcaataggtgagcaggatgctctcagaactttcttattgagaaggctcgataacctcaccaaagaggacaagatgcagattacgatgatctcaacttgggctactgagctgtacttagacaagattaatcgtctcctattggaggataccactgtcaccattataaattcagtagcagagcctaatagctctgaatatcgttcgatagtaaatgaattccgtgcttttcttagtgacagcaaagatgtattagatgaagcaacaacaatgaaactactggaaagttacggaagagtggatgagcttgtgtactttgccggtttgaaggagcagtatgaaattgtagttcatcattacattcagcaaggagaagcaagaaaagcattggaagtgcttcaacggcgcaatgttcctgtagaccttgtgtataaatttgctccagatttgatcatgttagatgcttatgagactgttgaatcatggatgatggcgagaaacaggttgaatccagggaaactcataccagcaatgatgcgttatgtgagcgaaccacatgcaaagaatgaaacacatgaagttatcaaatacttggaattttgtgtgaaagatttgaacaatgtggaccctggagtgcataatctgttgctatctctatatgccaagaaggaggatgaatcccagcttttgcaatttctcgacacaaaatttggtaaaggacaaacaaatggccctgacttcttttacgatccaaagtatgctctccgcctatgtcttcaagagaagagaatgcgtgcttgtgttcgtatttatagcatgatgtccatgcatgcggaagctgtggcacttgctttgaaggtggatttggaacttgcaaaggcagaagctgacaaagtagaagacgatgaagagcttaggaagaagctgtggcttaaggttgctaaacatgtcatcgagcaagagaaaggtgtcaagagagagaatataaagaaagcaatagaattcctttcggagaccaataacttgttaaagattgaggatatcttaccattcttcccagacttcgtattgattgacgatttcaaagaggaaatatgcaaatctctgaaggactacaacagccagattgagcagctcaagcaggagatggatgatgccacacgtggggcagataatatcagaagtgatattggtgccctcgctcagagatatacagtaattgaccgtgagcaggattgtggggtttgccggcgcaaaatattgactgttggagggttgcaccaggtagggagaagctatacatctgttggacacatggcccccttttatgtgtttccctgtggacatgccttccatgcaaattgcttgattggacatgtgactcgttgcagtaaccaggtgcaagctgagagaatattggaccttcagaaacggcttagcttgatggacaggaaagcagcaaaagacaatggggcaagtgttaatggcgaacctattacgagcacaaccccagttgataagctgagatcacagttggatgatgctgtagcaagcgagtgccccttctgcggtgatttgatgatcaaggagatttcacagccgttcattctcccccaagagtcggatgaaaaggcatcatgggaaatcaaacctcaaccaacgcctcaaaagattctcccgatgaccatgtctatttgatgctacggacagtacagcctaagatggatttggttttaaatttttatattgtttttgacttttgacactccttttgaccatgttttaatcctttttatgttgtggtatatggtattcaatatcctactgctgttgggttatcttgttttatatttacccaacttgtaaccctagaacaatgtagtcatcaatcgcttaccttgtggttgtggttcttgtattggatgcatcgtgttggaacatctcggtacacttgttatttgggattgtttttttttccgaagtcttgctccggaa

SEQ ID NO: 5061 - DNA, 2676 bp, Zea mays
tcgagcggccgggccgggctgcggctcgtggtatggagaatggatcacaacaagcttgtacagaaaagctttgctcgtttgtactacaatgatttcttgagaaactgcagcacggttgatgaagagtcgagggaaaagttggcaccgtatgcaggcttgtcatctgaagaaagctaccagagtcgcgaccttgaaaaggcatctcagcaagttgcaaagaacctgtacgagtccaaggttcagccaacaacattgatcccaaagcaagttgggaatatgtatacagcatcactctatgctgctcttgcatcggttatacataatagacatgaaactctggcaggccagaggattgttatgttttcgtatggcagtgggttgacatcaacaatgttctctttcaagattaatgaaggccatcaccctttcagcttgctaaacattgcaaacataatggatgtttccaagaaattgaaggcaagacatgtggtcccgccaaagaaatttatcgaggtactgaaactgatggagcaccggtatggggcgaaagatttcgtgaccagtcaagacacaagtttgctatctgtaggcacatattatctcacgcacgttgactccaagtaccgaaggttctatgacgtgaaaggtgacggtgtcaccactactgcaatgtccaacggccactgatctgtcttctgcccggagctgcaacaagtcaaataacagaggcaggtgttcctaagcattctgactcttcttagattatctattaggaagggacgctggagcttagattaatctctgccaagttgtaaggttgtaaagttagttagagctgcgtcattgctgtaatgcttgcttggtaaaagttctggcgctcttcagttcttcagtgcttgcaaaattcaaatcaagctcactactggttgtaagaattctgaataatctgcagaatcactggttacatccaagttacgctgttgaatgcatgatttcatgtttaacccgattaatgcatctggattcagctgtgttgttggagtactcgtgtcgtgtcttgtacctttttaaaaagaagtttcttacattccattgtccggatgtatgagttgactggagggagctgaactgctgaagagctgaactgggtatgagcaaatgtttcttgccctgtgagttttctccggtattcgtattctagtttcagtacgcagaaaatatcgatgtacgaatagaatttaggcattccaaaaacaaggcacgtcaattattacattgaataatgtgtaaattggtcaatcctatcaatcgtcacatgatcatgatcacaagttcacaaccgtctatgcttcatcaaacggctagaagatggcacagcacagcgcggcgtgctccattttcttcctggcggccggcccagagcctaccagtctccagagccaaaacgactgggcacaacatgtctccatccgacgacggcgaggaaaccctcgccgcgctcatagaactgtctagaacgccggagggccgggagggtctcaccgacgtgctcatcgacaccctcttcctcctcccggcctccccgccgcgcctcttgctcctccgcctacgcctcctccgcaacctcctcgccggcgatgagctcaaccactacgccttcatcgagcactccggccccgccgccgtcgccgcctccgtgctctccttcccctcgctcgcccccgacgtggcgcgcgccgcgctccaggcgctcgggaacgccgcgctcgccggggagctccaccgcgacgccgtctggcaggcgctcttccctgaggcgctgcgggtgttcgcggggctcagggaccagggagtcctggatcccctgtgcatggttctcgacacgtgctgcggcggggaaggcggtcgcgggaggctccaggagctgtgtcacgaggagctgggcctgccaatcctcgtccaagctgtcactacggcgtcacaaggtgagatgagctcagtgttgtttacttgtttaggtgtcctgttagggtaaacaaaatactgtacgtgctatggacatcgatgatttattttcagatgctaggacattataggtctgtatgtgatttgtcagttggaataatgatgcactgtactagtatcagtttgttgcatgatgagatgcatgagcctgctatcattgttggaaattggaatgcatacttttgcttttacataatggcatggcaagaaaatctatggttattttgttgcaatgtgctgtagccttcaacaatcagcactgggatttattatgctgctatagtagttcctccatgttgtattatatgaccctaaccagaatcatgcaatgcagtggagcacaaggaagagtggttagagtggcttctgttcaaagtctgtgctgaggagcagaagtttgagagcttgttctatgccttatgctctgctaatgatgtgggcgagtataatgctaagcatatttttcttctggatacgttgtcaaggtgtttgaatagccatcccgaagaagttaccgtctcagacagttttgcacatgatgtttttaatctacacaagcatgctgctgaaactgtgaattttacttaccgaggtacctcccctcttccaaccgggcaccctgcaatcgatgtccttggatatacactgcag

SEQ ID NO: 5062 - DNA, 3015 bp, Zea mays
  misc_feature (533)..(533): n is a, c, g, or t
  misc_feature (621)..(621): n is a, c, g, or t
  misc_feature (2911)..(2911): n is a, c, g, or t
cgatgataagtctaaataagatgaagggtgaaggcctagaaatgtttctctcggatcccccacataaacattgaacctcttttaggttgcaatataagtttttacgtgagaatatgctttttctgtgagataaattgattttcattagattaaacacaatatgtgttccaaagaagccataacccaaattataacaaaccctatagtaaacccaaagacaaactgcttcgtaaggaccaccataaccgtagcctattaagggcatgtacaaccagagatctttgatcggttttttagatataagggacaactaagagacaatatgatagaatctttaacccctagattataatgtagttaagatacaataagtatagaaaatagtgaagagacagacgcttcacgaagagctcatctcttaaatttttttgtttaacccttagagttttcttaaaaaaaccctcaactaatggggttgtgcatgctctaattaaactggctcttgtttcctattcctctattgccttttgacntatattcgctcttgaagagtgttgttgacaataaagttgcttgtgatgagacttctcttatccagccgagtcggaaattcaattcganccttttttttataaccatgcaaaaatgtttagtactacctccgttcacaaatatatgacattgttgattttttttaaaactttgaccacccgtcttattcgaaatatttatttaaaaatataaaataaatcataacaaaataaacgataactcaagttttttaaaaaaaaacaagtgtcaaagtaaaaaaaaaaatcaacagtgtcatatatatagtatatgcaggtggcgcgaaacagcggaacagttggggacggcaccttgacacatgtctgcgaaaaaaagtgcattttcccttgacctgaagctagtagacgttgacctggagtcctttatgaaggctgcttgctcagttgctctcactgctagttgccaagggcagcgagctgcttgcttattactgtcctattgtctgcctccacctgccggtacgaatacgaactcgcatcatgctcggtgctccaaccaaagcctctttgatcatctcctctccgcccttttcactttttactgtttgtgtatctccattctctagatatctatccttagctatagctgtatatcgaacaaattaacgtgcgagcaagaagcaacagtgttgtttcagttgctgtgtagggcagcgagctgcttgcttattactgtcctattgtctgcctccacctgccgcaagcaagggatgtggaacagcagatcacacttcgccggcgggcaggacaacgacggcaacgacgaccagccatacggatacggatacggtggcggccagcagtatgaagcaaccggcggcaagaaacgagcgtcctcgaggctgaagaagagcagcggcagcaagaaagacgacgagtacaccaagtacgcaggcaacagcaacgaggccgacgacaaccgccgcaacaggccgaacgacgacaataactacaacggcggcggcggcaaccactacagcggcgccggcgccgcaataggtgcgccctactacggtgctgctggcgccggcggctacgggagcagctctccctactacggcaacgccgctgtccacggcaccggcggcgacggcggcggcggctacgcaccgtacaacaacgctcccgccgccttctgggctccccaggacggcaccaggtcgcccatgtttatcagcactagggaggtgcacgtgtacggcgcgcctggcgggtacgacaactacgatggcagcaacaacgacgaccgccagaggaggagaggcggcggcggattcttcgggcccgcgttccatgccgtcggccgcttcttcgaccgcaagttcggcttcagcgacagggactgaagcgcacatacgccggcgttgccatgcattgcaacatgtatgctcgcgggcatctcgtcaatcgacgacagatctatctgccatctgcatgcgtgcaattacactacctagcttcttcgtccgcgtactagtgccctgctatcgttagctagagctcactgctcaccaccaggagccgtttattgcatcaaagtatttattccgagtgtgccatccagtgtcgtatttggtttccgttgtgatggagatgaaccgtatgtatacattaatacatgcatgtctatagcagaatgcaaatatgcatatgtgtggtgtgtgcttgctgctgagatttgtgtgcaagggcagcaagctagtgtgtgtgctatactattttgtttgtagacagtgtaataattatattatgtatatggtagtggtaattgtttaagatagggttgcgaaaacctttgaataatacgtacacagtgcatacacaaaaaatactcatatacatgcacgcgcagtaaactctttgaatacgtacacacactctagtactctacccttacaaacatctccaaaaaaattggctgacggatctcttctcaaagtcaaggatacttctattctataagtacaatccggatttgtgtagctatacctttctaaggtttccactaaggaaaaccatagaaatgtttcccttagtaagggaaatcagatgagtcatcatcttcttattcatttttttcatgtagttgatatgggttgatctactagcactaaatcatccttcgtgttttgatagtaattgttatgggcatgaagaatatgtggtcattacaccaaaatttatggaataaacacatggtgacatggcatggtttctcagattaaatatgccgtaagtattggatcaggactactcatctaactctatttttttttacgaatcgtagtactgacgcagacgctcatatgttatatatgtangcacactcaaccccagcgaataactttagtttgtggtgactcctccttattggcaaaaatgattagattcacgtgctcgggtgggcggtgaaatgtttaagaag

SEQ ID NO: 5063 - DNA, 1428 bp, Zea mays
tttttttttttttttttaggcggccttcgtaactcaatggatagatatatcatggtttagcccaacacacaatttgttcaagaatcaaaatactataatgagtgaagcacgttcggtaccagcacgtgcccaaccatcatactaaacacaaaaaggaaactcgactagtcgagtctaaacaagagcacctcccacagtatacactccagtgatttggaaattattagccgagactggaacacctttctgattcaaggtttggtgcgcatccactccaagaaaaaggtaccaacacaattcaccaatccagtgctgtttgaaggttggcctttacataagattcagtagggttgcaaaattcagtcagcagcctggttaagagggttgtctggggacttcttccacagtttccatatcatgtctttgtattggtgcagcgttagacctggcttttcttccttcagcttagggagctctgcctcttcaaatgccttaaaggtcgacttgaggcgacgctcaggatgcttgtcagcgggcagggacgcctgcggatccacgaccgacatccgcgcgatagcctcctcaaccgacctggcctcgatgagggaatcatccctgttagtgttttcgacgaggactacgcgctcgtactcctcctcctcggcgacccgcgcggcgcgcttcttggcggcctctgcctcccgctcgaggcggagccgctcctcctcggaggcgcacgagctcggcctcggtaaccttggggggcggagcggcaacgcgggacgccttgcgcgcggcggccttggacggcgccgatgcggaagcggcgacggcggcggcctctgcctcggcgaggcggcggttctcggccttgcgagccgcggcctcggcgcgcttctcggcgtcctcctcccggcggcgcgcagcgcgggacttggggccctcagcctcggcccagtactgctcctccttggcgcgctcctggcggtcgcggcggtcggcctccgcggcggagcggcggtcgcgggccgcctccgccttggagttgacacccatcttcttcggcatcacgggccccctcgtgcggcgactggcggcgcggcggcgtgtggctgatgtgacggccggatgggccgaagcaactgcaatccggactccgctttgcggttcggggggaatcccggccggcctcgaggtgtccttctgtaggaattggccagcggtggggtagggcacgcgttcgagagagttcttctgtacgcgtctggcccagaaatcgggtgacaccttctcacttggggctgattcggtgggaagggatagggagaaattagtttattttcccttaaattcttctaatccttctgtgatcttcttatcaccaaatcagttcttgctaaatgcaatttccacctttgacttctgcag

SEQ ID NO: 5064 - DNA, 1075 bp, Zea mays
cgagaatcagttgatatgcacgacaactttgaccaaataggtcttgcccagaagcttgagaagcatgaattgctggagatgaggaggattgctgcctacatttacaagaaggctggcacgtggaagcaatccattgctctatcaaagatagataacatgtacacaaggattgtatggagacatgctcacaatctggtgaccgtgaactgtcagaggacttgcttgtgtattttatcgagcagggtaagaaagaatgctttgcttcttgcctcttcatttgctacgacctgatccggccggatgtcgctcttgagcttgcgtggatgaacaacatgttggactttgccttcccatacctgttgcagttcatccgtgaatacactagcaaggtggatgatttagtgaaggacagaattgagtcacagaatgaagaaagagtcaaagagaaggaggagaaagatcttgtggctcagcagaacatgtatgcgcaattgcttcctcttgctttgcctgctccgccaatgcctggcatgggtggccctccacctccgatgggtgggatgggcatgcctccaatgggtggaatgggtatgccgccgatgggccctggtccgatgccagcattcgggatgccagcaatgggaagctactgagatgtttttgcagagagcttagacgacgatttgaatcgtccctgtgtaagcgaaggtggaaacttcattggagttgtagatggttacagtttggaattaatattctttatggtaccagaatttttttggcaagtgaaaccttagccagagtctgagaattgcaacctgttataccgtaggatcggataggatgagggtgattaggttggttgagcgagctgttgaaagctggtatcatttgtatagtgtgatgaaaactttgtagacattttgcttgtataatactcctacttgttggcacagtgaaggacaaacaaatgtatgctgacttgttatgtcctcctgattgcaatttgttagtatgtgttttcttgaagaagacagtaacattcgacagatactcgtgtctgtccatttttatg

SEQ ID NO: 5065 - DNA, 575 bp, Zea mays
catcccaatcgcctccccttgttgccgttgtgaatagccagctctacgccgccgaccagtcgacgaacgtggtcaagaagtaattcggctcgagcaacgcctgggacgtagtgaagccactgcccgtcagagctgactcgtccaatggctggggcctagctttcaaggcctgtggcgataggttgctggtgatcggaggccatagaggacctcgtggcgaggtaatactgctgcattcctggtgccccgaaggcggggaagactgggaggttctgtcggtgaaggaacgcgcaggcgtcttcgtttacaactgtgcaataatggggtgctgagttaccttttgctcctcggtacatgccgcagctggtttagcaaggcaacgaccatttcttgctgccatttagctaccttttatagtgacttgtaattcagaaatgacctcccctccccgaaatctcgcggcgctctcaaatgttgaatgttttgtagagagcatatatagagcattcagttaagtttacctggaactaccctctctctcttttttttctgttaaactcgttcacatttttttc

SEQ ID NO: 5066 - DNA, 1825 bp, Zea mays
aggatggaaaattttgtctaagttcttagtttaaagaaccagccattttattatatcactttgatcggtactactgcatatataaactttgcatattgagacaagctgaactattggacaattctggttctgtttaaagttatttatccttgaaactaattcagttaactgtttcactgaaacaatacaggtttatcacccaaacatcaactctaatgggagcatttgccttgatatcctcaaggagcaatggagccctgcactgaccatatcaaaggtcctcctctccatcagctcgctcctcaccgaccccaacccggacgacccccttgtccctgagatcgcccacatgtacaaaaaccagaggcagcgctacgaggaaactgcacgggcctggacccagaagtacgcaatgggctgattctgtcccactggacagtacttcccctgcaaagatcgtcacggtgttgtaagaatcaagttgcaccgttttcctgtcgtgtgatggtattaagagcccagatggctgtgtcaattgtactcgcttctcagaacaaagtctctctgtgtgtacagtgcttttgaagctggatgatctgagttctgtgctaaaaccttggtttgcacttcactttgttccctgaaatgggtttgcgaccactgaatttgcatgtgtaacctttccaagaaaccagtagcagtttgtatgttgtcaagatgttaataattcagatgggtggcctgcatccatctgaaatggagcgctatttgttaaaaccgtgcagataacagttcagtgctcttgcatatggaacatgtcgtctgcaccacgtgattgaaatggagctttccttgttgcagccactgctttttgattttgaatggcagaagttattacagaagtggcttgcagatctgctgccttgcttcaacatttgctagtctcgtggaaactgtcaggtccatcgctgttggttgaatgtggccatactttctgcaacgctgctgtttaccctctcccagctttcatctgcacaagcagtagaaagtcatagcctgccctttcttcttcgagatggacaaaagaggttgcatctgatggccaaccggccagtttggtctttctgtaccaggtcacttgtgtccttgtgcctttacttccatgtctccatgataatattcatagctgttctttttttagtgtattaccgggcgaaaattttgaagtacaggtgctttctccccctttgctataaagtcatgtgcaggtcttcatttggtatacctgtagccacacgctgggaaaaggcctgacacttgtgtacatacttgtgtaaggttgtacatgcacatgtggcagttgttatctacacactacaggagatagctgctttgccgcgtggcaaagcccaaaaaaccgctaggcaagaaaacactcggcaaactctttatttagatgagggctggcaggatgcaggacaacatagcagaacctgcacaggcaattatgcttatatggaggacaaacataaacctaaaaaaagaacgaaagaaagaactatctagcaaacatatatagtagaaaattgcaaaacaaaaacgtcagttaaacaaacaacagcagagattgctaggcagagcacgaggcatggacatctgcaggtaaactgacgaccaattgcatctgcaggacggcacctcaaagaccaagttacttgagttgtgtcgtatgcaaatcttgtgtaaataaagaatgtataagcatccatataaaagtgaattagcttaattgatatatgtctaaattactattattagaatggaa

SEQ ID NO: 5067 - DNA, 2719 bp, Zea mays
cattgggtacctcgaggccggccgggaaaacctaaaaaggactaaattaaaaaagacggacagcccagcccatctcgtcttgtctcggcgataccggctaccccgggggaccttccgtctatccaactcgcagcgtcccacgccggtgaccccgctgggcggcagaaggagacgtcgggtgccgcggagcgccgcggagcgccgccgccgtccaagctgcctccctcggctggtggactgtatcactgctcctcagacacccgctgttctgtccggcaacgtgcctccgccgcaaacccgctcgatcagcctgaggcatcgcacgatttctgactcatactttatcgccaattggctggggtggagcacatctctacccggacttgatagattccaatccttcccaactcaacgttgggcagatggcgcagatccccaatcttgacaacgcgccgctcaaccttgcggccctcagggagcagtcgcagaaggacttgttcggcatcctaaaaaatataaggggaaagaagtgcttggttatagatcccaagctcgctgggactctctcattggtcgtgcagacatcgctgctaaaggagtatggcgcggaagtgcggattctctctcccgaacccctgcagacggaatgccccaaaattgtatatcttgtgcactctcagctgaggttcatgaagttcatcgcaagtcaaatcaagaacgatgaacctaaagggctccagagggaatacttcctttactttgtacctcgccgcactgttgcttgtgagaagatcctggaggaagagaaagttcatcagaaactgacattcggagaatatcccttatatctagttccattggatgatgatgtcttgtctcttgaacttgaccattctttgcaggaatgccttattgaaggagatacaagttctatctggcatgttgctaaagcgatccataaattagagtttgcctttggagttatcccgaatgttagggccaagggtgtggcgtcaaccaaagctgcagagttgttgaatagtatgcaactagaggatccagtcaacatggatgatatggggattccagagataaacactgttattctgttagacagagaggtggacatggtaacaccaatgtgctctcagttgacgtatgaaggcttgttggatgagatgctacaaattaataatggttcagtggaagttgatgcaagcatcattggagctcaacaagatgggaaaaaggttaaggttccactgaattcaagcgataagttgtacaaggagattcgagacctcaattttgaagttgtagttcaggttttacgtcaaaaagcaacatctattcagcaagattatgcagaagtgaaatccaccaacactcagtctgtttcggagctcaaggattttgtgaggaggttgcactcgctaccggagatagctaggcatgttcatttggcacaacacttgcaatcgttcacggggaaaccctcctttcatgcccgactagacatagaacaaacaatactggaggttcagaactttgaaatatgctttgagtacattgaggagatgatacataagcaggaagttattgaaaacgtccttcgccttttggtgttactttctcttacaaatgccgggcttccaaagaagaattttgattacatgaggcgggagatacttcatagttatggctttgagcacatgcacttattatacaatctggagaaggctggccttcttaagaggcaggaatcaagaagcaattgggttggtattacaagagcactgcagcttatagttgacgtaaatgatacagcaaaccctactgatatatcctacatcttttctgggtacgcacctcttagtattcgccttgttcagcatgcagtgagatctggatggcggtctattgaagaactgttgaaactattgccaggcccacatctggatttgaaaagaggtggtttgacaattaattcatcaccggaggtacatccaggtttaggggctcaacagagtattgacagggttggtcatcgctctctggttttggttgtattcattggtggtgtcacatttgctgagattgctgcccttcgcttccttagtgcacaggaaggaatgggctacgactttcttgttgcaacaacaaaggttgtcaatggaaacacaatactcagacccattatagcaaatagcaaagaggggatgatgtaattttattccttttctgtgcatgtgttttttgtaattgcaattgcagacaaacccaagcttgtgggttttcttgtttggctgtgagttcgtgtttggtcagcaactggacgataaggctaaccacgcttgttgatagatggaatccaacagtcccattttttgttctgttctgttctgtagtacatccgctaaactgtaaatcctgggtttcatgtgttcgtctgtctttttattcaataattgcttccttgaaggccgtttatgttgtttgtggaccaatattgtgaaaaaagaaagaatgtatggaacctgttgcaaatctgcaaaaaaaaaaaaaaaaaaaaaaaaaaaaaaaaaaaaaaaaaaaaaaaacaaaaaaaaaaaaaaaaaaaaaaccctgcgcaataagaacagctctagctcccttcgtcgtggttttttcctccgcttcccggtcccccgttccccgccgcccgccgcataaaaccccg

SEQ ID NO: 5068 - DNA, 3009 bp, Zea mays
  misc_feature (2065)..(2065): n is a, c, g, or t
catatttatattgacatttatggcatgtgttctttagacatactactttctgtcactttttgttactgtaacttcggcaattttcaactgataacattttttcaattaacaacgtgaaagttgcattcgtcatcttcacactactttctagcacaagtcattggccactccactaaattacttccttttgtgtagccaaagcttttaatgtgcacttcagacttttagccattttgtattgactaatgtgttacatgtcgtattgcaatgcattagcatatgcctttactttgcgctggtattctttgtgtcatcttgctctaccctgtaacattactgcatcttttgttatcttatgtctactttgtaatgcatggtgtattcatcctttcattgtctcatttcaccatcaagaggcacccaaagtttgtttgcatgatttatttttaacattggtctaaatatgtattttgttaggtgatatttcattttacatgctgatgtttccgttatttcctatagtctttgcacactgtgctatccttattccttgtaccaaattttttgaagcaatgattagttgcagaatgcagatagttatttgttcggttcctgtgttctatctttcttttgcagctcgctataagctaataatttttcttatgcctctgcttctattccatcagatgcagcttttcatgtctgcctgatttttcttttactacgcaaaggttgatgctgtagtatacctggtagatgcatatgataaggagcgatttgctgaatcaaagaaggagctcgatgctctcctgtctgatgattctttggccaatgttccatttctcatccttggcaacaagattgatatcccatatgctgcctctgaagaggagctacggtatcacctaggccttagcaacttcacaaccgggaagggcaaggtcaaccttggcgactccaatgtccgtccacttgaggtcttcatgtgcagtgttgttcgcaagatgggctacggtgatggtttcaagtgggtctcccagtacatcaagtagggccctcgccgaggcgcatgctcagcccggcgaatttttttgccttgttcgttccggttggttcgtgacgagaacgaacgatggtcgctaggaaagtatcatggagggtatgaagaggaaaaacagtgcttaacattgttgaacatgttgagtctttagcgtcaaaacaatttatgtcgaactctattctttcgcttttccatacaacgtttactaagtacttgcgatgcattataaaattattactctttaattgtggtgtaatgttcgtgcattgcaactgagtaggagtcgttgcattatcattgcatgttcttggtttgattatgttttcttaaagcctctatctgtactataaaaagtctagttttcttttgtcaatcacgatcgttagatctattttttattagaatcatagggctgtcgtttattggcaggaacgcagaaactatcaatggaccgggtccttcggcacgacattggtcagtgcatgaccagcattatccgtgagattggatccccgcttgcacgcagcgaggcctatgtgaccgtatcatacgtaagttttctggatatatacaggtgcatataaataacattaggttgcaccggtgttcagtttttaggatgcagcctgattctcatgctggcaaccaaacaacctgtatgtgcgtatatcagtagaccgggtcctttagcatggcattggatcgctgcaaaattatgtgcatctgcctttgcggcctctcacatacatccaatgcaggcccacatgaatagaagaaaaaaaaaccaaggagggcttctatttctgtagtgtggatctgcacgggatggatgtgagaggctacaaaggtgtgcctttgcattcgggatgtacataatttttcccatgccgccactcccccacccccaacccaatcactgcacgcctccttgagacctactcgagtggagcaaggaaaggaatgacacgtatgtgccctcgccttcgttcgtctactgacgtgtanttgtaggccttgtggccataggggaaggatccgggtagcttcgtcaagcgcatgacgcacatgctcagcatctgttgcggccgccatagtttcgacctctagaagagcacctgctcctcttgcggctaccctaccgcctccctacttcctccctctctccgttcgtttgcctctgcctcactgctagatcgagacatttttagtgttaccatgttccgttgtggccgtcccagtttccatctccagaagagcatctgctctcctacgactaccctgctgcccgcatccacaagtgcatgatatgcctccttgcttcctctctctccctctctatctccgtcatttgcctcgctgctagatcgagcaagttttagtgttaccctattatgtttcgccctgattgtaatatgttgcttcgtgacatatctagatggccaaatagtgggatttagtatgttctattgtgaacttaaaactgggtgagattttgaacgttgtcacatatgcagacgtttgttgcttttaactttatgtgtgtgtatatatgcatctgtatattattatgctactgacttatatgtgatttctgctaatgtgttgttgaatttattcctgcatgaaatgatgatggaaacattgctccatgttactaattatacttgattgacaacaatgtttttcaagatgatcctagtgtgccacttgttgattttgtgctactttagaacctttgattcgtttcaagcatattatattgttttgctgttcatgccttgtatgtttgtgcatttccctcatctagagaactcgttgtatgcacttttgtagcatgttcaaccctgattttgtttactaattgatgaaaatgaaagctaccctaattttgtttatgaaggaccgatgagactattagagggggaggggtgaatgggagccacaaaatt

SEQ ID NO: 5069 - DNA, 2069 bp, Zea mays
  misc_feature (1777)..(1777): n is a, c, g, or t
tgggaccctcgaggccggccgggctcaccatgtggagagtggaccgaccatggccaccgccgccgacatccgcgtctccatcggctaccagacccgcttcgggctccgcctcgccgccgcgctctcctccccacccccatcccccgccagcaactccgccttctccccgctctccctccggcgccggcggcccccgcgtcgccttcgccgacggcgtcttcgtcgactcctcgctgaagctcaagccggccttcgaggaggtcgccgtgggaaagtacagggccgacacccagtccgtcgacttccaggaaaaggctgctgaagctgctggtcaagtgaactcatgggtagaaaaaattacttctggtctcatcaaagagatcctgcccccaggttctgttgaccacaccaccaggcttgttcttggtaatgcgctctattttaaaggagcttggactgagaagtttgatgcatctaaaacaaaagatagcgagttccaccttcttgatgggagctcagtccaagcacctttcatgtccagtacagacaaacaatatatcgtggcttacaacaacttgaaggtgcttaagcttccataccagcaaggtgcggacaagaggcagttctccatgtacattcttcttccagatgcaaaagatggcatctggagcttggctgaaaagctgagctctgaaccagagttcctggagaaccatgtcccaatgcacaaggttccagtcggacagttcaaagtccccaagttcaagatatcctttggatttgaggcatctgagttgctcaaaggtctcgggctccagcttccgtttagtgctgaagcggacctgtcggggttagttgattcaccagagggacggaacttgtctgtttcgtccgtattccacaagtcatttgtcgaagtgaacgaggaaggaacggaggccgctgccgcatctgctgcaacagttgtgctccggtcgttcacgatgcctcaggatttcgtcgcagatcaccctttcatgttcctgatccgcgaagacttgactggtgtggtgctgtttgtcggccacgtggtgaatcccctccttgctccatagtgtgttgttcagaagtgtggccttggtgcggttccatcccctcacagatgtgtggctttgacagctgatcaagctttatgtgtaatctgccatgttttgtttttgaataaatagatgcttgatcgatgtatgtaaggctgcgagatgatagttcagaattggtatgtgtggtcatggactcatggtacttactgtttccttcttcctctctgatgtttctggttctagtgacctttttccagtgacatctgtaagactgataacatatagattctgttgtgaagcacgtatcggttactgatgattatatttactgtttactttcgagttccacatcctgcttgattctgatgttcagtctttttttatataaaaataatgaattaggtttgtgccaattgtttcacaatgacacggtgttcacgatgataaggcaggcagaaatgagtagtttggtacaaatctctttgaatgaaaatacgtgaccctgaaaactgaacaatccgtttattcgttcggttatttctatacctcattggaagggattgaaaaaaaatataaaatattttgactcgatatgaattaaaacacactcaatcccttacaatccatacggaattagaaaaacctagctggaacaacgattttggcgcttcaattggccttatttctactaccgcagnatgctagaatagttcggtgaagtagccggggacaccaccgaggtgtagaataccgaaaaattgttgtgtaatcaagttttatatgcaactgccttgtaatcaaactataaaaaaatcttttaaaaaatatagatatattttattatttactctaccaatatattaaattttaagtaattacgatattttatagtggtgcacaggtaaaaggatttttttctctttttttttatttcgaatcttctattatgccatgtaaatattagagattgagttgtatacatttcgggtg

SEQ ID NO: 5070 - DNA, 2839 bp, Zea mays
cagcctcctctcctgttctcctgtctggccacgacaaccccggttcgtcttcatcgtcctcccagctcgttctgtgatctcgccggctccaatgacatgccttccataatcttccttctgacagttgtacccctgggccattcattatatattgctctcatggcaccgtggctcctgcactgcagctgcatcaccatcattcataggctgccttcctgcctgctgatctcgcacctcaaacccacacacagcagcatgtatgtatgcatccttgcctggtcgtttctcttccacccttcgtttccctgcagcatgctggctctccattactcatctcctcctcctgctgcatgtatggactttgtctgatgcttctcgatcttttgctgctgtgtttaatttgttggccggatcagcagaggttgagatagatggccagtctgtggaagaccaaggttctgcctggcctcgacaagatcttcgacaaggatggcaagaaggctgcccctgcaggcttcttcaagtccttcaacaaggtccgtatatatcacgtataacctatctatctatcttctacctgcaggagctacttcagatacgaaacctagctacaagcctgccgctcacttgatttcctcgctccgtatatgtttttgtcataatatatatagtatgagtttgttaataatcgagcctttcttatttaagctaacttgatttctatctatatacataaaaactgcaggaggagattggcaaggagattgaggagaagaaggcagaactggagcccaaggttgcggaggcttatgaagcatctcctcctgaggtcaaggtaattaattaacttatttatttatttatttttctgattgggcttgcttgctttagaagaactaagcaacgaaaactaggctgacgattgtacccgctgaatgattaattaggctctgttcaaggataagaagccagtcaagatcagcaagaagaactcgactgcagttaccaagttcctcgatgagctggctaagattggtaagcaaagtagagaaaactcttgtctcttcttctcttctctgtcgtatgtacctagctacttttccatgcatgatgtatacagttcctcaactgtttattatttgtcccacgtacgtccagacttccctggagccaaggtggtgagcgaggcggtggccaagtccggcgcctcgcccctgtctccggcgatcaccttcatcttggacaaggtcgcaccgtacatccccaaggaggagcccaaggcggaggacgcggtggctgaggccacttcccgggaagtcgccgtggaggtggaggatgccgagccggctatagctgatgcagcggccgagacaccatcggaggcgaagaagggagaggaggaaaagccggctgccgaggaggcggcgccaccggcagcggctgctactgaggagaagtaatactccgatccacagccatgcctctccctacgtagctgcagcagagtgaaaagtgattcagtcagtcagacatacacacttgcattggcacgcattattcatggacatgtacgttgctgccccgtgtgtgcgtgtgcgtgtgcgtgtgtgtgggggttctttgttttttattttggggcgattgttacaaatgtgtaattatttatatcgatatgtttgtttcattgatggaccgcatttaataagacaattctttcttgtgtatataagtatttttttccttgcttcgcggcgacgtcatttccaggcccagcacctagctatatgattatattttaggacggagagattacgtagacatgttttgacagacccatcatatacctccggatgtgagatgtagtaggtgtatgttctttttcagcattgaagataatgtatgggtacccatcaatgatcaaggatgattaatcttgctattaatcatcctgcgtgttcttcaccttccttgtgtttcttgtctttcccgtcgatagatgcgatagatgcggcatactcctttatcgctatcgatcgtactgatcaaactgcgctgctattattagttgatggagctggacatgcaagcatctagcaacttgcacttaagtggggttgctttgcttggtctgaattggattatgatctttgcgttggtggctagctcagtcaatcaaacagcctgaagatttcaggccatgtgcatggcaggtacagttgggggaaacagtccaaacaattgagatgagattttagacttgcaagcaattactaccttcgttttcaaatatttgtgacccgctaattcaattttaaactaaacctcgataaataaaaaagaacataggtagtagtacctaacccccttcttatttcctcaccagaaaaagcttcttcttgtttaacaattttttaaaagcctcaaacaggaaaaaccaaacagacaaattcaagattccgaccatgtgaatgacatatgcaaaaggggccttctagcctgcccgacacctaggtagggatgctcctaaaacatccgatttatatgacaaatctaatattttaatatagatatacataaaatttaaagctaatttttagcaatgttattaagaatattatgaagtatttaaataaaaatttaaataactttttatgtgcattattttctttctacaacaaaaaggtgaaaaaacatctgaatccgtattcgaatagacatatgaattttatatcaattattttaaaagatatagaaggaatttaagctttactttttatgaagattaatagcctcaatgctaaaaacaagaatataaatttacatagcaaattatatagtt

SEQ ID NO: 5071 - DNA, 2325 bp, Zea mays
  misc_feature (1)..(1): n is a, c, g, or t
ngatctctgatgatatgctaagtataagcaatgacagagaccaaaaggttgttaaacttggtgtgatgtctttgcttgctgtgtttaaggacgttattccaagttatcggattaggcagctgacagaaaaggagctagcagtagaagtttcgaaagaagtgaagaagacaagatattatgagtacacacttattcgctgctacaaggcctacctgcagaaattgatatcgttggagaagcagccctacttttatactgtggctgttcgttgcatgtgtgctttattagacactgccccacattttaacttccgtgaaagcctattggctagtgtggtaaaaaatttaagctcctcagatgatgtagtaaggaaaatgtgttgtgaagcaataagatcattatttataaatgaaggaaaacatcgtggtgaggcaacaatagaagcagttaggttgattgcagatcatgtgaagctcaatgattgccaacttcatcctgatagcattgaggtcttcctgtctttgagatttgatgaagatattggaaaagatgagattcaggaggaaaaggtgaaaccaaagaggaataaacgttggcaaaaaaatcaggaggttccgaagcaattgccagttaatgataagaagaaaaccagacaggaactgatctcaaaagctagaaaggaggttgatgcagaccttagagcagtttccttcactcttgacccgaaggagagaaaagggatacaaaaagaaacactttctgctctgtttgagacttacttccgcattctgaagcatagtatggccgcttcaaattcaaggactaaggtgaataatgtttcccctggtggctcacacccacttctcactccatgcctggagggtttagggaaattttcacatttaattgatttggatttcatgggtgaacttatatcttgcctcaagaagctttctgggtatagtgaccgacaagacgaaattcccaatgataatgcactgtctgtctcagaacgtctgcagtgctgcatagttgtgtttaaagtctggaggagcaaccttgaggcactgaatgtggatctgcaggatttctttgtgcagctctataacctcatactggagtatcggcctgacagggatcatggcgaggtattggctgatgcgctgaagacacttctttgggaaggcagacagcatgatatgctaagagccgctgctttcatcaaacgattagccacatttgctctctcatttggctctgcagaagcaatagcagcattggtcacactgaagcatctcctccaaaaaaacagcaagtgccgcaatatgttggaaaatgattctggtggcggttctctgtcttgcttagttgcgaaatacaaccccgaagctacggatccatatctgagtggtgcactcgcttcagtcctctgggagctcagcctcctagagaagcattatgacatctcagtttcctcgatggcttcgaatatcttgagtatggcaaacctgaatcccacccagaacccagttcctatcttgaacgtgaaccctcttgaagcgtacagagacctgtcattggaaagggaactatcaaaaccggctagcaaagcattgccactgaacctcaaaaggaagcggcgtgccaaggagtttgttgcgctaagcccagatgtgcttcagaaggcagattgctcggtggacaaagacgagctcgaagagaagctgcagagccatttctccgtgctaagaggcatatctgagaatgagaggttgagggcagagctgaaccacacactgtcatccataaacatgtacaaggagtacaagaagcagaaaaggaaaaacatgaaagttaagaccggaaggaaaaaaacagcaaggctttagccgtttaaggctttagccgtcttatctgttccggaggtctttgcgctcgaccggtggatgggtgtaattttcagttttttttgggcatatttcccattgactactatagtgcagttttctgccacccttttgccgtttctgcacaccacactatgaaagacttgtttgcatttgtgattttgggaaatggtttagggaagttatagttttttccccatttttctcagtttctctatacgattttgaggggaaagcggatagattcttccctaacgcattatacattgatattcacttttttcattctcctattttaagtcttgtcggttacataagattggagtagatttagaggattggattcctttctattcaaaatagaaaaaggaagagatttaatcctctctaatttctctaacggaataaacttttcgga

SEQ ID NO: 5072 - DNA, 3156 bp, Zea mays
cgctcgggacctcgaggccggccgggctttccggcctatctctatctatccctcctcggctcctcgccctttcccctcttgcccgagtcgctagcctccctgcccctgcccctgccccgcctcctcccgtggaccacttcctccaccttcgcttccatagcaggctagcagctgagcgaggtcaactcttccgccggcggagagagagggagggagcggggaagagacgggagggtctccgcgcacctgccatcagccaccacccgatacccaggtcttgtcgtcccgcgcagatctgctgctgcccttgagatctaaatcaaagcttccgctccggttgttgtcggttggtcggtacctgggcggcggcggcacgggaggacagcgaacatgtcgtcgagcacgatccggaaggccctgggcgcggtgaaggaccagaccagcatcagcctcgccaaggtcactagcaacatcgcgcccgatctggacgtgctcatcgtcaaggccaccagccacgacgacgagccggccgaggagcgccacatccgcgagatcctccaccttacgtccggatcccgcgcccacgttgccgctgccgtggcagggtgctcccgcaggctctcccgcacccgcgactatgtggtcgcgctcaagtcgctcatgctcgtgcaccgcctccttgtcgatggcgacccgtccttccaccgcgagctcctacatggcacacggcggggcacccgcctgctgaacctctctgattttcgggacgaggcgcactctggatcgtgggatcactctgcctttgtgcgcacctatgcgctctaccttgaccagcgcctcgagttcttcctccatgagcgcaagcaggggttaaatgctggcagcagcagcagtgctaatggcccatcaccacgggaccgtgatcgctggggttcgcctgatccctatggccgccgctctccctcctactcgtcaccccctgggtatggaggatatgatgattaccgcgagaggaatggtgggaacaatgatgacaagaggccaccgaccccggtgagggatatgaagcctgagcgtgtccttgctcgtatgcaccacctacagcagctgcttgacaggttccttgcttgccgccccactggtggtgcaaagcaaagcaggatggtgctggttgcgctgtatcagattgtgagagagagcttccagctctactctgatatctgcgaggtgctggcggtgctgctggacaggttctttgacatggagtatgcggaatgcgtgaaggcttttgaggcatatgctagtgctgcaaagcagattgatgagctctctgcattctattcatggtgtaaagatactggagttgcaaggtcatctgagtacccagaggtgcagcgtgtcactgataagttgctggagacgctagaagagttcatgagggaccgggcaaagaggcctaagagcccaccacgggagcctgaacctgagcctgttaaggaagaacctgagccggatatgaacagcatcaaagcgcttccagcaccagaagattataaggagcctgaacctgtgaaggtggaggaagaggtgaagccggagccacccccacagccacagggtgacttggtggatctcagagaagatactgttagtgcagatgagcaaggtaataggcttgctctagcactcttccagggaccgcccgctgctggtggaaacaatggttcatgggaggctttcccttcaaatggtggcaacgaggtgacttcggcatggcagaatcctgcagctgaacctgggaaggctgattgggagcttgccctcgtagagacagcaagcaacttgtccatgcagaagccagcaatgtcaggtggtatggacccgctgctgctgaatggtatgtatgaccagggtgttgtgcgtcagcacgttagtgcacaggtgaccaccgggagtgccagcagcgtcgccctgcctgctcctggacagaagactcagatgcttgctctgcccgcaccggatggttcaatgcagactgttggtggtgacccctttgcagcgtcccttgccgtcccaccaccatcctatgtgcagatggcagatttggagaagaagcaacagctcttgtcgcaggagcagattatgtggcaacagtaccagagggacggcatgcaagggcaatcgagcctgaacaagctcgaccaggcttaccacaatggtttcgcgcccaacccgggcatgccctatgggatgcccgcggcgtacaacactgggtattactaccctacttactgaggaagcctattctttattcatccttacagttgctgtgaatttttgttctgtgttgtgatcttactcccagccctggggttgtgtccagcatcagctgttgttcccctgtctctggatcaaaccttttggtctgatatatgtaatgtaattttatttgtttggaaccaaatgcggcatccgagagtagctatagtatattacataatctcaattgatctgtacactgtttctgctaaacttctgcatgttatcacttcccttcacttgatgttgcagtgcgtttgttgcgtgtcacacaccgatgttggatcgccatgtttgttggaagagcttgctggttgttggcattaagggtgtcatgtttggtggtataactatttttgttgtgacttcacttttactaaaggtgggctctgttcagacgacggctttaccattgattggatccttgaccttttacacggataagagtttttttgtccttataaaaaatataatttatttattatgatttgtgctaacatggacaacagttttatttttgtacttctatagaaaaattgtaatttgtaacatggacagcagttttatttttgtacttctatagaaaaattgtaatttatttttgtacttttatagaaaaattgtaattatttttgtacttctatagaaaaatttgtaatttgtcatactgcatcagatttgaaccgttggagatctctagcaagctttttataggcacctgaaatatagcatattccttctctgaaatagcatattcaaaattttccaaactctcctctgtctgggctcaccggacagtccggtgtgcaccggacactgcactgtgcaatgtccggt

SEQ ID NO: 5073 - DNA, 4004 bp, Zea mays
cggtccggccatcccggtcaattcggcacgaggcgctagacctcaaagactcgatcgcaccgcatcttctctctctgctcctcgttcgcttcgtcgccggcgaccccgccgccagcttccccttccgctggccgccctttgcctcgcccctgaggcgtcggtttccactgcataggagtggggcggcgatccgactggacctagggttgcgagaccccatagggtgaccctaggagcatccgcctccacgtgggtgaggcggaggagggaggatgtcgtcgctcagccgggagctggtcttcctcattctgcagttcctcgatgaggagaaattcaaagagaccgtccacaagcttgagcaggagtccggattctatttcaacatgaagtactttgaggacgaggtcgtcaatgggaattgggatgaggtggagcgctaccttggtggattcacaaaggtcgacgataaccgctactccatgaagatattctttgagatccgcaaacagaagtatctcgaggctcttgataagcatgatcggtcaaaggctgttgaaatcttggtcaaggaccttaaggtatttgcatcctttaatgaggagttgtttaaggagatcacacagcttctgaccttggagaactttagggaaaatgagcagctttctaagtatggcgatacaaaatctgcaagagcaataatgtttgttgagctgaagaagctgattgaagctaaccccttgttccgtgataagctacaatttcctagcctgaagaattctaggttgcggacacttattaaccagagcttaaactggcagcaccagctttgcaaaaatcccaggcctaatcctgacatcaagactctatttgttgatcattcatgtggacaaccaaatggtgcacgtgctccatcaccagcaaacaatccattactcggatctatgcccaaacctggaggtttccctccattgggtgcccatggaccttttcaaccttcaccaacacctgttccacctctggctgggtggatgtcaaaccctccagcagtaacacatcctgctgtgtctggtggtgccattggatttggcactcctacaaatcctgccgctttgttgaagcatcctagaacacccacaactgctaatcctggtatggattatccatcaggagattctgatcacatctccaagagaactagaccagttggcatgtctgaggaggtgaatcttccggtgaatatgctgcctgtgacttatccgcagagccataattaccaacaagatgatttccataaaactgttgcacggaccttgagccaaggatcaacaccgatgagcatggatttccatccacttcaacaaactcttcttcttgttggtaccaatgttggcgacattggattgtgggatgttggtaccaaagacagactcgttgtaaggaacttcaaagtctgggacctcagtaaatgtacaatgattctccaggcatcactggttaagcagcctccggtgtcagttaatcgcataatatggagtcctgatggaaccttgtttggtgttgcttattcaaggcatattgtacaaatttattcctataatggtggcgacgatattagacaacacttggagattgatgcacatattggtggtgtaaatgacattgcatttgctcatccaaataagcagttatgtataattacatgtggagatgataagacaattaaggtatgggaggccaccagtggagctaagcaatttacatttgaaggacatgaagctcctgtttattcagtttgtccacattacaaggaaaatattcagttcatcttctcgactgctttagatgggaagatcaaggcatggctatatgataatatgggatctagagttgactatgatgcaccaggtcattggtgcactacaatggcatatagcgcagatggttcaaggttattttcatgtgggaccagcaaggatggtgaatcacatctagtagaatggaatgaaagtgaaggagcagtgaagagaacatatcagggatttcgtaagcgatccatgggtgtcgtgcaattcgataccacacggaacaggtttttggccgctggggatgaattcatgattaagatatgggacatggacagcacgggtcttctaactaccattgatgcagatggtggcttaattgcaagtccacggatacgcttcaacaaggaaggaactcttttggctgtctctaccgttgacaatggcatcaagatcttagcaaatgctgatggacttcggttgctgcgcacgctggaaaatcgttcttttgatgcttctcgtaatgcatctgaggctgtaacaaagcctctaataaatcccttgactgctgcggcaaatgcagctgcagcaagcagttcaggagctggtgctccgtcagctgtaactgcaatgaatggggataccagaagtttggttgatgtaaaacctagaatagctgatgagtcactggacaagtcaaaggcgtggaagcttatggagataactgagtcaactcagtgcagatcaattaaactggcagacaacatgagaacgagcaagatctcgagattgatttacacaaattctggtcttgctatcttggctttaacttcaagtgctgttcatctactctggaaatggccacgcagtgatcggaattctggaaaggcaagcgcgagtgtgtctcccacactatggcaaccaccaagtggcattttgatgactaatgacacgactgacaacaatcctgaagaagctgttcactgctttgctttgtcgaagaatgattcatatgtcatgtccgcttctggaggaaaaatctctctgttcaacatgatgactttcaagacaatgacaacatttatgcctgcaccgccggcagcaacttttcttgcatttcacccccaagataacaacataattgcaattggaatggatgactcaaccatccaaatctataatgtccgaattgatgaggtcaaaagcaagctcaggggtcactctaagagaatcacgggtcttgccttttcaaatgtgctaaatgtcttagtctcttccggagctgatgctcagttatgtgtttggaacacggatggatgggaaaagcaaaagaacagatttttgcagataccgtcaggtcgccaatctaatatcttggacactcgtgttcagttccaccaagatcaaatgcactttcttgttgtgcatgaaacccagattgccatctatgaaactacaaaactagaaccagtgaagcagtggcctgttcgagagaattcacctccaatcacacatgctgcattctcgtgtgacagtcaactgatctatgcaagctttatggatgccactgttggcatatttaatgcatcgagtttgagacttcaatgtcggattcttccagcttcgtatctccccccaaatatcagtccgagtgttcatcctgttgtggttgcggcacacccttcggaagcgagtcagtttgctctagggctgactgatggtggtgtttttgtgttggaacctttggaatcagatagaaaatggggaaatcctccaccggtagaaaatgggtctgctagcaacttgtccgcaccgcctcctaatggagcttcaagttctgatcaacctgaaagatgattgagaagatggaactggtagatttttcgtggcatgagtctaaccaagatgggcttcaaaaggtggtgcaactaaccttggcagatcggttccaagggactcggacaatgggctcaataaaaacaagctcaacagcagtttatccgttgcttatatatatttctattgactgtatcgagtgaagaggatagttctagtatttcattttgctttgtttactgtgctgtgaaaaggagttcttatcagtagataagctgtagacaactatcagtttggctcctacattttatgacttagtgaaagtatcttgtttcatttgcctattggccccgatcgagggggggc

SEQ ID NO: 5074 - DNA, 1395 bp, Zea mays
cattgggtacctcgaggccggccgggggcggcccactcgctctcgctctacctccccgtcgtcacgcgctcgcctgtgcccctagcgtttcgccacctcctgctcccgcaccgcctccggctccgcctcgcctccgccgtctccccatcccgggcgcggcccctcggcctcggcgcccgcccgccccgcccccacgccgcacccctcggctacggagttggtgcagggagaaggccgagtggtggactggaccacagagccatgtcaagttccacaaattcaacagtggccacggagttgtcggtgtctgagaatagcagggaaattgagccgctaccttttgtgaatgacaaacatggaggcgtcatcattgagatgaagactccaatggatcctggagtgttttcagcttacttgaaagcagcgctggcaaaatggagggagcagggaataagaggtgtctggatcaaattacccatcaccctttccaaccttattccaacagttgtagaggaaggtttctggtaccatcatgcagaggaaacttacttgatgcttgcgtactggcttccaaatacaacacatacactaccagtaaacgcaacccaccgtgttggtgttggagcttttataatgaatgacaaaagagaggtcttggttgtacaagaaaagagtggtgtacttcgaggcctaggtgtgtggaaatttccaactggcgtagttgaaccgggggaagatattaacgttggagccataagagaagtaaaagaagagaccgggattgatgcagaatttgttgaagtgctggccttcaggcagagccacaaagctttttttgataaatcagatctatttttcgtgtgcctgctacgaccgctgtcatatgacattacgaagcaagactcggaaatagaagcatgccagtggatgccagtagaggaatttgcagcacaaccatttgtccagaaacatgagcttgtgaagtacatcctcgaagtaggcctggctaaagttgacaagaaatatgcagggttttcgccaatctccataaaatcggcgtttacagacaaattgtccttattttacatgaaccggagggacctggacaaagcctcaggatagagtaatatgtaattaaacacagggaattcaagatagttgaaatttcagttctggtatgtaaaagcaggccaagtcattcatacttgattattttgttcacaaattggaagtttcgggcatccgacacttgtgatttttcgaccatatgtcgtctgctacacatctgtgtttcaaaggagtgttgcaatccaaaagtagagataaaactgttgtgcttatggatttgtatttgtaggtctacagacaataaaacactgttttcctttattatat

SEQ ID NO: 5075 - DNA, 2026 bp, Zea mays
agacgggggcagagctggcaagtggcaaggctgcgcagccgcagagggactttttgtgtaaaatgcggtgggaaggtgcgctgcacctgcaagcagaggtgtgctctactgacagagtttgaactctcaagaggaggcgaggcagaaccgcaatcgcgaccgcgacccgcaggtgacatacatacggtgcgagcgccggaagccggaagcaccggtgacgaagccttccgtgtcatcactcatcaggatctcagggttttgtttcgtttcgcgggcgttgggaatccatccatggcgaggaagatgctcatcgacggggaggtggcggccgtcgcggatggtgggcactatgactacgatctcttcgtcatcggggcgggcagcggcggcgttcgcggctctcgcaccgccgcctccttcggagctaaggttgcgatttgtgagctcccattccaccccatcagctcagagtggctaggaggacatggtgggacttgcgtgatacgtggttgcgtacctaaaaagatactcgtgtatggtgcatcattccgtggagaatttgaggattcgaagaattttgggtgggagattaacggagatattaacttcaattggaaaacgctattggaaaataagactaaagaaattgttagattaaatggtgtgtatcagaggatccttaccagtgccggtgtgacaatgattgaaggggcaggcagtctagttgatgctcatactgttgaagttagccagcccgatggttcaaagcaaaggtataccgcgaagcacattttgatcgcgactggtagccgtgctcaacgtgtcaacatacctggaaaggatctggctattacttctgatgaggccttgagcttggaggagcttccaaagcgcgctgtaatcctgggtggcggatatattgctgttgaatttgcttctatctggagggggatgggtgctgaagtagatttgttttatcgaagagatcttcctctaagaggttttgatgatgagatgagagctattgttgcaagcaaccttgagggaaggggaatcaagttgcatccagggacaaatctctctgagttgagtaaaacggctgacggaataaaagttgtaactgataaaggagaagagctcattgcagatgttgtcctatttgcgacagggcgcacaccaaactcccagagactgaacttgcaagctgcaggcgttgagattgaccgggttggagccatcaaggttgacgaatattctcgtacttctgctcctagtgtatgggctgtgggtgatgtaacaaaccggattaatttaacacctgttgcattgatggaggcaacttgctttgctaaaactgtgtttggtggccagcaagttaagcctgatcacagagatgttccttgtgctgttttctccattccaccactatctgtagtgggcctcagcgaagaacaggccttggaggaagctaatggtgatattcttgttttcatctcatcattcaacccaatgaagaacagcatatccaagcgccaggagaagactatcatgaaactggtagttgatgctgaaactgacaaagtacttggtgcatccatgtgtggaccagacgcacctgaaattatccagggcatcgctattgcggttaaatgtggagccaccaaagcagacttcgacagcactgtcggaatccacccttccgctgctgaagagttcgtgaccatgcgcaccgtgacgaggcgcttgagcccgacatccaagccaaagacgaacttgtaagcaagaaattggtattctggggaaatgttacaccggacaaatacactggtttcatcacgttggtaatttttacgtcattggaactggaaccatgtatattgaaggaataagttgtttttttcatggcaacacaccgaaaataatgagaccgtggactttcttgatacaaataatgagctcaagcagagaacgtttatggttggttctcaaaaaaaaaaaaaaaaaaaaaaaaaaaaaaaaaaaaaaa

SEQ ID NO: 5076 - DNA, 1836 bp, Zea mays
cctcgaggccggcccggacgcgtgggggcgctcagataaaaatctcacgcagtagacaaatccacgctttccttcgcctcctctcctctatcgcagtcgcggccaaggccaacgaaccaattcctctacggcccaccttcttcctacctgccattctcccatccagcacagcagggcgtctcctcctcctccctcccgcttttatcgccgcctccatttccaggacgcgtcgaattcctccatctaccgcgccggccgccgaggcccgagggggaggaggatgctgggcgccgcgaggaggcagcttggatccggtcccatgctgggacaggttttgcgaaggctccgcccggcggcggcggctgaggtggcgaggggctactccgctgcggcgaaggagatgactgtccgtgatgcattgaactctgcactggatgaagagatgtctgctgatccttctgtttttctgatgggagaagaggttggagagtatcaaggtgcatacaagatttctaagggcttgcttgacaagtatggtcccgatagggttcttgacacacctatcacagaggctggctttactggcattggtgttggtgcagcttaccaaggtcttcggcctgttatagaatttatgacatttaatttctcgatgcaggctattgatcatatcatcaattcagctgctaagtcaaactacatgtcagccggtcagatatctgttcctattgtttttagaggaccaaatggagctgctgctggagttggtgctcaacactcacagtgttatgcagcttggtatgcacatgttccaggacttaaggttctcacaccatactcttcagaagatgcccgaggcttgcttaaagctgctattagggatcctgatcctgttattttcttggaaaatgaattgctttatggagaatctttcccagtttctgctgaagtgcttgattctagtttttgcctaccgattggcaaagctaagatagaacgtgggggtaaagatgttaccattactgcattctccaagatggttggctatgctctccaggctgcagagatactgtccaaggaaggaatcagtgctgaggtgatcaaccttcgatcgatcagaccacttgatagagctgctattaatgcatctgtcaggaaaaccaaccgattggtgactgttgaagaagggttccctcaacatgggattggtgccgagatatgcatgtctgttgtagaagaaagctttgagtaccttgatgccccagttgagaggatcgctggagctgatgtacctatgccctatgctgccaaccttgagagaatggctgttccacaggtcgatgacattgtgcgggcagcaaagcgggcctgctacagggcagtaccaatggccgcagctgcctgattggtgtacagacctttctgtttttcttcctcagttttcgctctcgggcagcaagaaacatgtagtattcataaggtgccggcaaattggccggaccccagactccaagcgagctagtttttgtagatctgctatggtgtgctttattccgttagtcgatatatgttgcattgtttctagtttcgaagtccatttatttacttctctatgatttctacacacggcctaataatcttgctaaggccctgattgaatggaaaatattttttgggagttttaggaaaatactacatttttgtgaaataccttggttttgagtaacagtaatatgaaggggatgtttggttagaagaaccaatccattctaaaaaaaaggtttatcaaaaacaccccaaccccacaaaaaaaaaaaaaaaaaaaaaaaagggggg

SEQ ID NO: 5077 - DNA, 2199 bp, Zea mays
ttgggtacctcgcggccggtcgggcgcggcccgccgggccggacgactcgtaaaaaaatagcgtcttttatcatatccgttgctcgcaaaacgcccccacacgccgccggcgaatcggcgactccccttgcgacgggaggaagcagccacgccgccgtctcggcgcctccccgacgactgcctctccggtctcgaacgcgatctggcccatggtggctctggcgccgttggttcgtgagatctagggttgtcgagcgccgcggagtgggagcggatggggcgccggaagatgtccgcagcggcgccgccgtcccggagctggtccaacgttggcgggagcgtaatccccgaactacgggcaaaacacaaaacggacttggaaaatttgacgctgacaaaacatccaatcagaacattacattttttcctgttagccatgttacaatacttgaaaagattagcaacatatatcctgagaaagagtggtttgttctttctcttaattgttttggtggtagcttccggaatcttgctctctatttcagatggcctgcataagaagcatgtgcaggagttccttaattatgctaaattcgtgttgtggtggatttcattaggtgtggcttcatcaattggactaggttctgggttgcatacatttgtgctgtatctaggtcctcatattgctctgttcactattaaagctgttcagtgtggccgaattgatttgaaaatggctccatatgataccatacagcttaaggttgggccatcatggctcgacaagaaatgttctgaatttggtccgcctgtgtatccagcatcagctcattctgttaggatccccgtctttgatttactacctcagatacagctggaagcagttctttggggcattgggactgcacttggcgagcttcccccttattttatatcacgagcagctcgcttatcaggaagcaagtcaaaagctgttaaggagcttgatgccgctacttccaaagaagatgggacagtagcatccactcttgatcgctccaagcgttggcttctttctcactctcaacatctcaacttcttctctatcttgatacttgcttcggttccgaacccactctttgatctcgctggaattatgtgtggccaatttggtgtacctttctgggagttcttttttgcaactttgattgggaaggccatcatcaagactcatattcagacgctgtttatcgtgtccttatgcaacaaccagctcctgtatcttatggaaaaggagctaatctggatattcggtcacattcctgggttttctgctaccctaccatctgtgattgccaaactccatgctgccaaggacaagtatctatcaccaccgacaccagtctcggcgtcctcacagatggaggagaaaagttggaatctctcttttacattggtttggaactctatagtgtggcttgtgcttctgaacttctccgttaagataatcacgtcgacggcacaggattatctcaaaaagcagcaggatatggagatggaacgcgtttctgattctccgcccccggaacaaaactaactagcggcgcaagtttatttcagctgctagctgcacagattctcctctgcatttttagcaactggttaagcgtctgcagacgattccaagttccaacgattatcaattagtattagtagctattcatctacacagtcaacgaaaacatgggcctggcaactggccgggtgatggctgtgacctcctatcatatcattgagcctgtagtgggcagttcctggaggagaattctactgttcttttttgtttttccggacatctacacggatagacagtagggattgtttgtgtgaagcacggttggcttatgccgagatttagcactggtagatgtttctatttgttttggaaatgctatagaaacatgtgagcattcaacaatgatacgctctgttaagtttgttgtgtattttggtttgcaactggtgcccgaaagagcaaacagtggctccatcaatttcctttggcaagtaaaaccccctatagaagacattgcttgtcctaaaaaaagtccgctgaagcatgtagggataatgtgtatttcaagtgtttgtatttatgctgttataagtgtatagtaattataaacgatgtctttaggcacaaaataattctactggggc

SEQ ID NO: 5078 - DNA, 1585 bp, Zea mays
gaaagtggaaggcggctgcctgctcccgcggtctcttccgtctcggaggtgggagagagcgatcagcggcgtcgccgggtggatccaaagcgcgcgagaaaatgcagggcggatccagcggcatcgtgtatggtggcctcaagtaccaggcgcggtgtatcgccgacatacgcgcggacgccggctcgaccaccttcctcgccggcaccctcagcctcaaggaggagaacgaggtgcacctgatccggttttcgccggcggagagcgagctggtgtgcgatggcctcttctaccaccccaacgagatttgggacctcaaatcatgccccttcgatcacagggttttctccacagtctacacgtctggtgagggctatggtgcatcagtttggaagatcccggagctcaatgggcaatcaaactcaccacaacttgagcagctctttgagcttagtgggcatacgggcaagattagacgtgtgatctggtggccacttggaaagcatgataaactaattagcattgatgaccgaaatatttttctttggaacatagacacgtcaaaaaaaatagctaaggtgatctcacagggatcaactgacatgcttccaaatttacgtggtggagcttgggatccacacaatcataatttagttgctgcaatatctgattcatcacttcagctgtgggatctacgttctatggaaaaatcaactgcaattgaacatgcacatatacgggatgtggattataaccccaagaagcaaaacattgttgcaacagcagaagaggaatttggaattcgcttgtgggatctcagaatgcttaagtatcctctaaaagatctccctgggcactcacattggacatgggctgttcggcacaatcctgcgtatgatgagctccttctgagtgctggaacagattcaactgtaaatttatggttggctaaagttagcagtgacgatcctgaatctgatagcccttctgctttatccaataggcaagaagtaccattactcaactcatatactgactatgaagacagcatctatggtattgcatggagctcccatgatccatcattattcgcttctttgtcatatgatggaagggttgtcttggaatcagtcaagccctacttgcagagaaaatgaaccttgtctagttttctaaattgtaaggtgcaaaatatggttccttgtttcctttatcttgtccttattattactgaagttacctcatgtcctaataaactgttctcttcctgctacctgtgggcttgtttgttcatattggaagctgagtagctttgccttgccattctgtagcctcttaacaagcatttatgtgatgattcggtttactgttgtagcaatggcagaaaaatggataacaagattgttacagaaatcaatttttaggatgttgtatatttgaagtgtccactgaaaaggtcttgtgttatatgatgaggtggggttgaactcaatttgtaaaaccgttcagaatttcagattagtaggattagtttttttttacttttctgtttcgcattcagaatttcgttctttgcaggtagaag

SEQ ID NO: 5079 - DNA, 2362 bp, Zea mays
tttcaattctgcgggcaatgcgttgatttctcccgcctctctgcgcggattcatgcagcatccagctgcatccagttatttggcttagcctcgtcgtttatattagagtagttcgtgggcgatgattattattacggtggctaaattcgagttatgcacatattcatcacggagaccccgagagttggtgcatgatgcactgaatcccagctgcacatgtttaaaacagcgacacagttatatcccagtaggaggtattattttctattgatcttttgagtgcagcatcgtcgcgtcagcagcggcgaagctctatactggtcagacccattaggtgtattccattcccacctacagtcggtgaatcactcgtctgcatctcatcgaagctggtgatgcaagctttgcatgcatccttagcttattaactggtgaagtggtttctttcgccctgtaactctttgggtgtaacttatggagagcgattagcaaattattaccgttttagatagttctgcgtcaagattttaaaccatttttttctgtaagttttttgctgtctctgtcaccctttgcgtgaagagagctaggtgggccgtagaaaaggcttcagttcagatctcatttcagatagcacaggaccaatctggtctgcagtgttcaactggaatataagatttcgctgcataggtcaaaggtttgtacgagtgaaaaaggtatttatttttaagttcatttagtattattttggctggctgaattgtatatttctatgttattttactatactattgaaaaaatgagtaaattgtatgttgtgataatctgaacttttacatgacagactagcagatactgtcatggctcaggatgaagctgtggctacccaaaagactggaaatacaacatctccttctaaggattacccaactccttctccatatcctgattggtcaaccatgcaggcatattatggccctggtgtcttgccaccaacatattttactcctgcaatagctccaggtcatccaccgccatatatgtggggtcctcagcctataatgccaccccctttcgggacaccatatgctgcagtatacccacatggtggagcttacccacacccccttgtgcccatgatgtcaactccaatgagcgtggagccagccaaatctgcgaatagcaaggagaaaaattccaataagaaacttaaggaaatagatcggactgcagtgtctgctggcagtggtaacagtaaaagaacagtgtcatccattgaagattacagtgcagaaggctcaagcgatgtaaacgatcagaatgtgaacgaaacgtccaggaagcggagctcagatggtggacctggcgcagaaaccaccacaggtggaaacacggaatgtgttttagctcctaaccatacgctggggaatgctaccattttgccacaacactgcttttcagctccagtaattaagcccagtgctacaaatgtcgcgaactcgagggcgataggcacggcattatctccaccacctggtgtgatggttccagttcataatgcagtaccatctgacttatcagttaaggatgagagggaattgaagcgcgaaaagaggaagcagtcaaatagggagtccgctagacgatcaaggctgagaaaacaggctgagacagaggagttggctacacaagtggagtctcttgcagcagagaacacgtcccttagatctgaaatcggccggctaacagagagctcagagaagctcagactagagaactcagctctaatggtgaagctgaaggacaccgcagaaccgtctcccagcaaagcagccgcatccccatcctctccccgtgcctcggcggagaacttcctttccatgatcgacagcgccaacgcgccgagcgtcagcaggcacacggagcacggcggtcccaggctccggcagctcctggactccagtccggcgacagacgtcgccgccgtaagctgatgatgaagccggtccggcaaatacgccacagcacatgcatgtggcctggggattccgcaggctcatgcggctcgagtgctcgccgtaaacgtcagcgttacggactcggactctgtactccagtttaggcactgattccaccgagggtaccggtaattttatctgctctcgcgccagagtgccgggctgcctgcgaccactcctgtgtacccagagttgtaacgtagtagggtgttgtgctgcatgccgaccttttgaaacttttcgagaccgtcatttggaccatttttttcgtcgcaataacacaatacagatcggagtttgtaccggaggtatgtaaaaaaaaaaaaaaaaaaaaagggcggccg

SEQ ID NO: 5080 - DNA, 3092 bp, Zea mays
gtcggagagagcgagcgagcgagcgagagtggtggtggtgtgtgcgcgagcgcaacagggagaaaaagagcgtatttcttcttcctcaccctcctcgaggaagagagagggcagctccggagccgcacgggcgcgagcgaggcaggcagtggctcctcccccctcctttcgatatcagctcatcgattcgtcctatcacacacatatcattaccgctcctcttcctcacctatgcttgtcctctaactcattggcagaagagaaaaaaaaagtccttgttgagttgttgtatcgggttctggtggtgactgttactggggtttccttgcccggttcttgatttgcgcaaggacagatttgccgtcctctcgggttccgccgtgcggtgctgaatcctccttccctgttcccttcccttaggtttggatcggggatagggatggaagtggacagaaagaagaatttgcagattggatccaaggggaaggaggttcagagcaagaatccgaggcgggaggagccgctggcatcgtcggaggtggacatggatgagccagacgctcctgagagcggtgacatgattgttgatggcaacaatggcagctccagagagagccccttgcagcccatggattccaagaattccaagggctgtgcggtcaagaagccaacatcggtgagctcagacttcggtgaggagctggacttggaccttggtggggagaagagtgggacgcagcaggagaggaagctctcaaggcaagaccgggttgagctttgccggtcgttccagcttgcagtgagctcccatgattgggagagcgccgaggggctggtaggaatggctgatgcacaagggctcaacgatgtgctgtgtgtggcagtggatgcgatttggttcttgagtgatagggatgagctgcttgctattgtggggttgatcaaaagggttgtgtctgagggcgcaaaagattttacccgtgctgcgctccggacatcattcctcgcatcgtgtgtatcagcatgtagggggcggtcgactagccttgctgatgcagtgagcttcatgggccagaaattgcatgaacgacttcaagaatcccaaggtgatgaggtattgaaagcagaagcaagtgcaaaggtgcacaggtttacagaatgggctctaaagtgtatcgggctgcattcacgtgttcgagagaacaggggcaaaggaaaccacgacactgtaattgaggttcagcttcagttgtctgctttcaagatatttcttgatcttgctgataatgagcttaccgggaaggattttacggaggcttttgatgctgcatgcttccctcttacactcttttcaaccaccttcgaccaaggatgggcatcaggaatatcagcagctgcagtacaaggccttttagagttgttggtagagggtggtgcagacaatgtgaaccaatgctttcttgaagctgcacgctatggcagcactgagctcgtgcggatcttacttcaggttgctcaaagaaacagcttggacattgatgtggacctagcccttggctttgccgcacactatgggaagatcgaaaccatgggatgcttggttgaagaaggtaatgctattggctttcttggccctttgatgcgtgctgctgaacgtgggtgcctccaagttgtggaatggtttgtcaaccacgggtgtcgagaaatggagctttgcctagcccttactgctgccacctctaatagccagattgcagttgctgcttatcttcttcctcttgtcccgcaacatgttcttgcccccctcagcattgagattatcaaggctgctggtgagaggactacgggttccctgcagggtgtggattttcttctccgctcggatttcctcaatgacccagctgccacatatgccgtggcagacagtattgcaagatgcaccgatgaagctgtggacgcaaagcttaggtctttcatgaatgagcactggagcgaggcagctttttgtgcgggattcgaatctgcacagcagcactttgttaatttcatgaggataatggaaaggggtgaatcaccaatccgcttaggggacctcccacttgagctggtgattgccatggcctacctgccgctctataaggaatgcatgaattccaatgggcgacttttgcctcaaaggcttagaggtcagcttgtggaggctgcaagcaggctcgaggaccggcaagtggaaagggatagccaaagcagagaactcttggccatcttggagcaccacataccacgattcatgatccaaacttgaaggtaagcgcaggcatccactctgaaccactgctgtcaatgcaagcaaaaaacaacttacaagggcaatccacgccgtcttcagtgccgccaccatgttcctgcttggggggacatcaccaaatgatagcatcttgagttggctctcctgcaggcgatcttcggagagtatataattctggggaatggtgtgtgccttgtcgaggcatgtgtcggagtgttttactgggaccgtaatcttccatgaaaaaaatgatataagccttcggtatgtaatcctgagttttcggtgtaattcaaaacgctggtcttgtgacaacatgtcgctagttttggctagcgacttttttgatcatggcttcaaaaacaaaacgaagggagtatattcatactgtgtggagattgccttgatcgtgagatgtgacatggttctgatgaggtacaagtttgagcaactctgatagcttcaaaaaaaaaaaaaaaagcatcctacttgtcagaatgtggtttacttcattgcgtttaaacaaggagaattagacatcgcgcaacatagaaaatgcaggtcatgcctctcgaggaagatagcaccgttgatggctttcatctacaaaatactatccctcggtacaaaatactctctctctctctttatcttggcaagaacaaagttgacgtttttttagaagtcaaacgattttaagttcataaaatatatatagtaaagtactaacatttatgataccaactaattataattaaattaattattaatatattttaatagt

SEQ ID NO: 5081 - DNA, 1562 bp, Zea mays
tgttgacatgaccatttttacgtacataatgttagacttcgattatccactacctgagacactgcttgagttaggatctcgcccacgcgtcccgccggttgttgatcccaccaatagagccgtgtactataatgatagatctcctccggctgaattgaagcgagacatgccggtgggaactgaagctgccagctaccgcctccccgtttcagctccggacgctgctgcggcagctgcagccaccgccgcgacacaggcccctcctggatatgtgcttgcccagatgcatgcgcctccgccaccgcagcaacctccaccacagcagcaaccacaacagccagctcctcagcagattgttgctgctgggaatcaacatttcatccacaaccctgccactggcacctttattccaatccaatcctattaccaccatcctgtccatcagcaggcaccccagaccatgcaaaggcagcaacaggcacctacgttcgacccaaatacagggatgtattatgttcctatgcagcagaacgcacatcaggcatatggcgtgcctcctggtgcacaagtcactttgccacctccgacccttgttgacacaacgccaaagccaaccgtgccaattcctcagatggcagtaaggcctgaattgcaacaacctggtgtctaccgaacaacagctgcggctacccctgctccagcgcctaatgcagcacctggatatgctgggatggcctaccaccatgtcatccaatcccaccaccaccaccaccctgcgccgcagcctgtagcaaacatggctggcaactacgggtatgagtttgctgatcctacgcgcccgcaagtctactactcacaggcagctgcacctccaacattgccacagtatccgcccattgtctctcctgatgctggccaggctgaaaaacattaagcagactgaggattggtgaattcaggtatgcctcaaattctagaggccttgttatccgtctgttacttatcattatcgttgctaccgcatgttacatgaatccgcggcaaagagtgaagatgttgctattaggcaactgtgcatttgcattgggatcaaaacaagcatgcatcatccaaggataggttcaacataaggtttttattggatggttcttgtgttggtgagacagaagggtgccggattagtttgggggagtgaagtgttggatccctgttccaaattggtcttttttttttccctttcttcttattttgaataaaatatagtgtccaaaagaacctggtggaaacgaagaactcatcatcatcatcatcattttgtgtagccctctgtatatttgatctcatggatgtcattcaggttgaggtgcagataagtgtgttattagcttgcttgtagaaaccttatgcgagttaaatatatatatacatcggtcccgtattgtactttgatattgatgttggtatgtttctttttgttgaatacattgacttcgatttttcttgctgctttagtcgttctggttccgtctacctcccaaatttcatcgcagcacacatagcat

SEQ ID NO: 5082 - DNA, 1940 bp, Zea mays
attttatttctcaaaagtaaaaggatctaaacagccttaaaaatgatttcagaagatgccgaattcaatgaagtccgacagaaggctaaattaagaaatctgatgaaccatggagaagataacatcaagtccgcgactactgtagtctgtaggcactaggccgtccattctgcccagtgcgcacgacggccaggatcttcaaacggcacgagcacggcagcggccgtcgctggccactcaccgcgcgccacgtacaccacaaaggggcatataaagatgccaacccaaagtagcgtgagtgcgtgacgcaccagctgcttcccccctatatatatctatataaaaaaagaaagaaaaaaaaccggacaaacgtgtggcgtcggcagccgggcaggtaggaaaaggtatcagcgtcgccaatctccatggagctcacaggcgccgcgctccggcgatacgcgctgccgtcggcgtccccggtggccgcgagggtggggaggaggaggcgaccagccagggtggcctgcgtcgggggcggggggttcgcggaggaggggcacctcaggtactacgaggcggccccgcggaggaaggcggtggaggcggtggcgagggacctgggaaagctccgggccatggggctcgtcgcgggggacgcagccaaggagaaggtcctctcggaagccacggatcttctgctgcaggagctgagccagatgaaggatgcggaatacaagataaacaagatggagaaagaacagaatgctgctatgaaagcactgaagaagcaggagaggcgcaccaagaagactgccatcatgatgatgaagtgtgaagaagatgagtcatctgagtcgagcgagagcgattgtgaggacgaggcaaccatgaatgccgagcaggacatggtgatgtcaacagcggttcccgaggttgttgcatcaagcatctcagctgtcctcgcgatggagtgtgataaggctgcagtgaaggccatgaagaaaatggagaaggaacaaatgaaggccatgaagaagatggagaaggaacagaagaaggctgcgaagaaggccatgaagatggagaaggaagcaaagaagatggcaatggctacactgaatggctgcagggatgaagacgattcctcatgctcatcagagtcgagtgaaagtgaatgcgagggccaagttatgaggatgagccgctgcgctacaatcaccgcaccggaaatgccacctccaagcacgggtcttccaatcatagttcctcaaattccagcacctttggcaccacagccgtctcaatctcaaccttcagagccagcaaccgcagtgcaagccaccagagtcagcagcgttgcagtaactgagacatccacaaccagcagaattgaggtctgcatggggggcaaatgcaagaagtcaggcgcgcttgctctcctgcaggagttcgagaaggctgtgggcaccggtggcgcggtcgtcggctgcaagtgcctggggaagtgcggcctaggtcccaacgtgaggctgaggagcggtgcctctgcggaaggttctgcaaaggggaacccactctgcatcggtgtaggctttgaagatgttgacaccatcgtggctggtctctttggaggcgctgatctgggcatgacacccacctagacctggtggtactacctcgacctagtcgtacttcaagaaatcaagagcacaacttgtaatcacagatgttgcattgaacaaatgtatagtgcagctacggccttgctagtgctactgctaagtttatgtactctatgtctatatagaacacgtatggtaatcttgtttctggtatgtgatccatattggtcagtgattgttttcatggttttcagatttgagcatctgtggcaatgtagggatggttaatgctaaaaaaaaaaaaaaaaaaaaaaaaaa

SEQ ID NO: 5083 - DNA, 2201 bp, Zea mays
cattgggtacctcgaggccggccgggaccgcacgtccgcacgccgctcttcttcccctgcttgctctgggttcctccattcctctccagtctccatcacaggagcacgcgacgcgcgccacaggaaggaagggaaaaaacatggcggcggcgaacggggacgcgtgccgcagcgtcggcggggtgccgcgcccgacgaaccccatggtgacgccgctgctcaccgacctgtaccagttcaccatggcctacgcctactggaaggccggcaagcacctcgaccgcgcagtctttgatctctacttccggaaaaatccatttggcggggagttcaccatcttcggtggcctcgaggaatgtataaggttcattgctaacttcaagttcacggaggaggaaatcaaatttcttcgatctgtcatgcctgcatgtgaggatgacttctttgagtacctccgttcgattgactgctcagacgtggaggtttatgccataccagagggttatgctgtgttccctaaagttccactgatgagaattgaaggacctgttgctgttgtccagcttcttgaaactccatttctaagtcttgtcaactatgcttctctggttaccacgaatgcggcacggcaccgacttgtagctgggaagtcaaagaatttacttgaatttggacttcgacgggctcaagggcctgatggaggaatcagtgcatcaagatattgttatatgggaggctttgatgcaacaagcaatgttgcagcaggaagattgtttgggataccaatacgtgggactcattcacatgcatttgtgagctccttcatgggtcttgatgaaattactgacaaaacacttactagttctgatggttcaaacacatgtgaagattttatctctctggtgcagaactggctgatcaggattcaggattctagttcattgcatggcacctttggagaaacgagccaaagtgagttggctgcattcacgtcatatgcactggcatttccaaattccttcctggccttggttgacacatatgatgtcatgagaagcggagtgccaaacttctgtgctgttgctttggccctcaatgatatggggtataaggcagtcggaattaggttggactctggtgatttagcatacctatccgttgaggcccgcaagttcttccatgcagttgaaaaagaatttgtagttgttggctttgggaaaacaagtatcacagcaagcaatgatcttaatgaagaaactatagatgctctgaacaagcagggccatgaggtagatgcatttggtattggcacctacctagttacatgctatgcacaagctgcacttggttgtgtattcaaattagttgagattaacaaacagcctcgtattaaactttctgaagatgtcatgaaggtatcgataccatgtaagaaaaaatgctacagattgtatggcaaagaagggtatccgttggttgatataatgaccggagaagatgagccaggtccaaagattggtgaaaggctcctatgtcgtcaccctttcaatgaatcaaagagagcgtacgttgttccacagcatgttgaggaattattgaagtgctactggcctggaaattcatcgaattcacgggaggagcttccatccatccatgagattaggactcggtgtattcaccatctggaccgaatgaggccagaccatatgaggcggctgaacccgacgccttacaaggtaagcgtgagtgctaagctgtatgacttcatccatttcttgtggctcaacgaagcgcctgtcggagaactgcaatgatgaaatgaagtggcggtagggtcggatcccaaacctaactctaataagctgatccgcttatgggtgccgtcggagcaaataacaaactgttgccgccggtgcaatttctgcagtagttttaccatcgcctgcgctctagtaaaatgtgagtatgtgctggtgcatctgtcaaaacagaccatagctgaagtgttacgtactgggaacaagaggatacccataccgagttagatctatatgactgaactaattgcaatgaggagcaatcactaaatttgagacaaatttacttgtcttgtcaattaccctaccattctcctctgcggcattttatgctttttactgaaccccagttagactgttaaaaaaaaaaaaaaaaaagcggcc

SEQ ID NO: 5084 - DNA, 2769 bp, Zea mays
ccgggccgcaagcaagcagcgactcccgccgcgcacggcaccttcccctcccccgcacggccgcacacaccagacaccaccaccactcgcaagtctcttcgccgtctcgccgagttattagaaggcggggaaaaaaatcaactcgaacgggcgggtggcaaccaaccaccaagcggcgagggcgatggcggcgtccccgccgcggaagcggctccctgctgcgcgcctcatcttcgccctccttctcctgatgtcctccgtgctgccgagggacgccggggcggtggaactggggctgaagctgcccttcagtccgggggacgtgctccccgtcctgccgcggcaggtggcgtggcccgtcatgaacacgctccacagcgccgtcgacctactgccgtccttcgtcgccgccgtggcgcccgggtcgccggcgccggcggcctggaaaggcgcgtgcttctcggagaacgaggccgctatcgagctcacgcccggggaccgcaacgggaccgacgtcggcggtgccgtactgcgcctcaagactgcttcagctcatagttgggcgtgcatggatctctacgtttttgcaacaccatataggataacatgggactattattttgctgctcgggagcacactttggagattaaatcatgggaggaagaagcggaattgaaatatgtgaaggagcatggcatttctatttttctcatgccatctggaatgctcggaactttgctatctttgattgatgtcctgcctttgttttcaaacactgcctggggccaacattccaacctagcctttttagagaagcatatgggagcctcatttgagaaacgaacccaaccttgggttgctaacattagaaaggaggatatacaatctggtgactttttggctttatcaaagattcgaggacgatggggtgggtttgagacattagagaaatgggtgactggtgcatttgctgggcatacctcggtttgcttaaaagacgagaagggtgatctttgggttgcagagtcaggctatgaaaacgagaagggagaagaaatcattgctatagttccttgggatgaatggtgggccatggctctcaaggatgaatcaaatcctcagatagccctgcttcctttgcaccctgatgtgcgtgccagattcaacgaaagtgctgcatgggaatatgcccggagcatggttggaaatccttatggctaccataacatgatatttagctggatcgatacaattggagataattatccacctcctcttgatgctaacctggtaatggcagttatgtcaatgtggactagattgcagccagtttatgctgcaaacatgtggaatgaagctctaaacaaacgacttggcactgaggatttggaccttcaggggatcattatggagattgaaagacgtggaatgtcttttgatcagttgctcaccatacccgagcaagacgaatgggtgtacagtgatggtaaatcaactacttgtgtcgccttcattcttgcaatgtacaaggaggctggaatattcacccctttctcggagtcgatccaggtcaccgagttcactattcgtgacgcatacatgctcaagatatttgaagacaacccggcaaggcttccaggttggtgcaacgcagacacggacaagcttcccttttgccagattctcggagagtacagaatggagctaccagagtacaacacgattgaaccttatgcgaaaatgaacgagaactgtccgtccttgcccccaacgtacaaacgacccgcacgctgctgactacgagattgtctactatgtatctttctgcagctgcttcgtttacacagtggcagtagagtgttgttgctatgttctgtaaataaaagacactatatatataggtgcttggtagatggtagttcttaccagtaatgtagctgcgatgtattcaggttcacggttttcagtcgatcagttctgaagccacggcgtcggcgaccaatatgaaggttaggatttgtcagctccggaaagttgcttatatgtatcaatgtatgtatgtaggcaacattatggcttggtcataaattgtgaactccgtcaagaaataaatctataatgcaacgtcaggtgattctgataaaaaaaaaaaaaaaagacgaaaacataacaaagattactccatctgtcccaaatctatctattattatagagtagctgtagattcctaaaaacctaattttagctataagctgtggcagctgttgcacggtgacggttgtagctaaaatatatttagttaaaataactgtcaattatagattctgtaagagcatgatagcttaataaattgatagcagaaatctgaaaaatttaggtagaagaaaatttttaattgaactatagaaatatatatatatttagaaatttattctctatttgtttggtagagattcaaatttctggcggtgaatctagtttagatagctgaaccaagcacaccatatgatatggatattaatcaaaaaagagaaaatatgtatagttgaattttaggaagatctaactgtctagcttaaacaatatacctgtaccacatacaatataatagtttggagcccaagaaaatggtatgctcatcctattatagctcagcaggtgcaggtttgattctttttggaaggtgaattttaaaataaggaaagagtccggctactaggccgtttttatttgcattggccaaacaaaggaaacactgcaggcatgca

SEQ ID NO: 5085 - DNA, 2448 bp, Zea mays
ttttttttttttttttttgctaacttccgtgaaattaaaatgctcacgaacgaatttgtgatttagaatttagaatacaagtgccacgttatttcatcagagagctcctaccctaagtttatctggacgccattcagaactacacgtacatattgtacctatacacgtcggatctctcaataaggatcctccaacttcacttcaaattcagcatccccagtagcttccaacatgtccagtattttcttcgggccaagagttgtgattgattggccctcagcataaccaaccattagaagtttccctatcttcgacctccaatcagaaacagatttctcagtccacctgtcatggaccacacgatcacggtagttgaccattgtgccaagcccagtgtttcttagccagccatatccttccaaaacatgtgcctcgccttctgttaaatctgtaccaaccagtaacggcctgttttcaataagagctgtccttccacagccactaagcttcattgcaacaaccagcctacggatctgccattctattggccttgattggaccacctcaaagaagtatgttgcataaccatattcaggacgctcaagaactatcctattatggcttctaaatataaaaataaaggattgcagatccctgcaccatccccattccacaggacagtcacggaatcgaaggtatcgtgactgctcaataagagaaattaaacaggataagcagtaaatagacttttcccccctttcgtatctagctgctgacagtaaatgacattttcccctcttcggaaatatatttgcaatcacgttttcaagatcttcaaagttactttctgtagaatctgcaatcatttcattatcttcttcagcaccgtaaagtttgatttcttcaactcctattcctctgtccaaaagaatctttagaagccctggagcatcttcatcaagtgccttttcaattgaatccgtggctgttttcttcctctttcgacgagaacggtatgcaacaccctcatcaacagtgtaagcatcttctttaagtgttttttcagttgaataacttgttttcctttttctgcgttgtcgggaactgaaagaaacattctcacataagccaggtaactcacagtcagttagttcatcttttattcctaaagatagtactgagccttcggcatgagtagaattttcttgaggtaattcggaaggaccaatctcataacctcctaatgcaggttccagttttacatcagccagatgagccccttgttttcttgcaaccagctcactgttttcacccatacaagttgcagtgccacctatctggttttcggaaccctccactggaagatcttcaccaagtattctcctgttgctgtcatcatccatgggattactctataatagaaggtgcagaagaaatttcctgcaacatgctgaatatatcttctttgcttatttttccctcatgatttcttttgggagatgctctgctagtttccacatgcattatagatttcccagctgatactgtagtaagccccagacttttgtctgctagaaggatcctgtagcgctctttcagagatatatgatcaagctcatcggtttcagtacagatttcaggattaaagccttggccccattccacgcttgaatctttatgtgtggaaacatcccattcggattcaatatgagttccctcggccaattcacacagcctgttccgtgatgcaaggaatatttttgacgccactatctctgactctgccttcactgtgttttgtaaatgatactgatgtaatctccaatcagtttcctgagatcttttatcactcggcatgtctgcatacagggcaaacacttccttgcaacccgtcagtgttccatccaggatgatggatctagggcttccaattttcctccagcagttatttacatcattctcactgcgcccgcgcgcaaaacttctatggaagaagtatgatgcacgaccatcttgcctaacacctggtatatgttgaggatgagtgcaaataaattctctaacatcatcaacaaatttaatgaactcgttgataaatggatggcgctcagctagagcgttcccaacttctgctgctagatgccacagaagatcactatcactgggattaaattctacaccccttggtagacctggccaactctcagaatacatcaatatggtaggatcaggagcggacccagcaaaggacatgagcatacagatgtacacccaataactggtgggtgctcgtcgccagtgaaggccccaacgaagacctggcgaagggactgacgttgctagacctgggcaccagagaaccaggagtacggcggcggcggtcgtcggccagttgcgccaggagtgagagagggcgcgcgcacgaacgcggcccggccggcctcgagg

SEQ ID NO: 5086 - DNA, 2912 bp, Zea mays
gggtcgcccagctccgctaatgtcctcaacagtgcgggggggggctgcagacttttgaggggggcgtgaaacgatggagaaagacttggagaacctatgagtgatctatttgcgtgttttgtgctagaccctctcgcaaccgcatcaatagcacaagttcatcgtgcaactctggcagaggggggagaggggttgtcaaaattcagcatgatggggtgaaggagatcatattagaggagctgaagaatgcaaaatcattgattgaatggatagcgtgggcagagcctcagtatgattttaatccgatgattgatgaatggggcaaggaggctccaaaggagcttgagttggaccatgaagcagagaatactagggctgtgtccaggaatcttagtcgcaaaagtgactgtgggagtggcagtgtttccagtactgtggatgtactcattccagaagttattcagtcaactggcaaggtgctaattttggaatatatgggtgggattcgtttaaatgataatgattcattgggaagcgtatggtgttgacaagcaaaaactgggcgaagagataacccgtgcgtacgctcatcaaatatacattgatggcttctttaacggcgaccctcatcctggcaattttcttgtgagcaaggaacctccacataaaccgattctccttgattttgggctcactaagcgcatatctgaatctatgaggcaggcactagcaaaaatgtttttgtcatgtgcagagggtcactagtcccccccccccccccccttttcagagatggggcttaaactgcgggttgacatgcctcagcaggctatggatattgccacagtattctttcgtcagtcaaccacagcaagtgaagcaaaggagaacataaaaacacttaatgaccaaagagagagaaatgtcaaagctcttcaagaaaagatgaaattgaacaagaaggaggttcaacgctttaatcctgttgatgctttccccggggatgccataatatttatgagggtcttgaatctcctcagaggtctttcagcttcactaaatgttaggatagtttatctggacatcatgaggccatctgctgaatcaactttgttagggagtttgacacacggacaaatacctaacagtcagtggatttttgactcacctgctaactctgatgtggagtctaaactgagaaattatctgcttgagttgggaagcgacaaaattttaggaatacaagtctgcgcatataaagatggaaaggtcataatagatactgctgctggtatgctggggaagtatatccccgacctgttcaacctgattctctttttcctgttttctcagtgactaagggtatcactgctgggatggtacattggcttgtggacaaagggaagctgaagtacgaggaaacagttgccaacatatggccgaattttggaactaacggaaaggagttaataaaggtccatcatcttctaaatcacacatccggtttgcacaatgcactgggtgatgtggtaaagaatgatcctttgttggtatgtgactgggaggagacactaaaccagattacgaagagtacacctgagaccgaacctggttcagcacaaatttaccattacctctccttcggttggctgtgtgggggagtcatagagcatgcatctgggaagaagtttcaagagattctagaagaggctattgttcgtcctcttcacattgagggggagttgtatgttggcattccaccaggtgtcgagtctcggctggcagcgctgacagttgacaccgaggagctccagaagctatcaggaatcagggcaggtgcagatgtgccagcagctctgctgaacaacatcgcgcagatggcgtccggtgtgcccgctattttcaacacgctaaacgtccgtcgggccatcatccctgccgccaacggccactgctctgcccgcgcgctcgctcgatactacgcggcgctagcggccggcggttctgttcccccgccgcactcttcgggcgccatgccgcccctcggcagccacgtgcacacccccaagttcccgaccgcgccgctcaagaagaagaagaagggcgccggaaagaagaagggcgccggcggcggctccatgggagacctcaaggtccaggatataagcggcggcagcagcgacaggaacgggtactgccagctgcgcaccagcgacgccgacagcgaggcggggagcggcagcggcggaggcggcaggatgttcggcagcgacaggatcctcgacgcgttcatgggcgtcggcgagtacgagggcatggcgcaccgggacggcaagttcgggctcgggttcaggaggtacgacgacgccggcagcggcagcggcaggctgaggtgctttgggcactccgggatgggcggctcgaccgggttctgcgacgtggagaacggcttcgccatcgcggtgacggtgaacaagctgtctctgggcagcgtcacgcgcggcgtcgtccggctcgtcctcgaggaactgggcctgcccgtgccggacgagtactcggccaccggggagaaggggcctgacatgatgctcaacctgacgacaacgacgacgactacgccgccgcaactgagatgacgacggcgaaactgagattaccaggttgggttcgtaataatctgtggaacaagatatatagcgagcagaaggaaggtggggtacagggatttggtggacagtatatatacgcgtgccattttgattttgacgtggcatgtaaaactcggcaaattctggtatattacgaagcaagctgggtgctgggaattgtggccagcagtacaagaaatggacatgctagtttgttgaccaaaaaaaaaaaaaaaaaaaactcgagggggggcccggtaccca

SEQ ID NO: 5087 - DNA, 3093 bp, Zea mays
tttttgttttgtttcatccagcaacacaaaggtgctgtatctactagttgcatctcgcacatgcccaggaattttccaacagcgtcttctaatattggatagtattaacaacgcataaagttacatgcttatcagccaaccttaccttacttcccaacgtccgaaatgaccaaggatgaacagaaatctgcaaggaagggggactaaagactactcttgcgcttacgtggtactgatatatcattgggactaccactacagctacaactaaaagagctcgaactcgatgtcgtcgccattcagccggaattccagacatttgccttcctttttcttgcgtgttcccgcgagtgttgctgcagtatcaatatttttcggggtctctggtggtgaagtccaccggatcaaggcccagttcagaccttcgaagaagggatgccgcttaatctcagcagctcctctcgacgagccaagccggtactccggttctttcacaagcagccctctgatcagatctcgagcgtggaagcttaatgctggactgtcagggaacttcaagccctgtgagatcacatttgagagtgtttcgtcattgtccggtcccctgaatggtgtcttgccatagagtaattcgtaaaggaagattccaagagtccaccaatcaaccgagctgccatggccatctcctcgaatgatctctggggcaagatattcatgggtcccaacaaacgaatttgaccttgcttccgtaggctcaacaacgagctgtggaagtgatggtttcttcaggggttcagctctagtcctccgtgtccttgacggtgtagatgaaaccagactgggcgtgaagcaagacgaattgctccacgatggctggatacacaggggatcaatgcagctttgtgcacagggaccagaaggcctacttggctcatctctgtctactgatgatgttctcacaagcattgggctcactgagcacctcagcgacagatcaaagtctgagagcatgatgtgcccatcttcacgaacaaggatgttctctggcttcagatcacggtatatgacccccaacatatggagatactccaaggctaagaggacttcagcgacataaaaccttgcagctgcttccgaaaaggttttggtaggttgcttctgcctaagaacatgtaggtcaccaccagggcaaaactccattaccagacaagaaaggttgtccgtcgtgaaatgagaatacagggttggaaggaatgggtggtcgagcatttgcagtatctccctctcagtttgtgctctgagcattttctttctgcttatgaggtactcgatgtccataaccttcaatgcgaacatgcagtctgagcccactaactcagccaaataaacagtgccaatatccccacaaccaagttgtttgagaagcttgaagttctttaatcccaagctcccttgttggatagccatgcgcctgatggctccccatctcacatcctttgacatgtgaggcctgcttctgttagcactgaagctgccataactgtcctcactgatgcttgtgctggtgctataatcaccaatgctactcttagagctttgggagcattctcccttctcctttgatcttaacaactcaccaaccttcgagccatggatcacaccgacaccacagcctttggtgccaaaatcagctccatcaacagtggtggagctgacagtagccttcttgtcagttggcgctggggttctgggttcatcctgaagggactcctgatgtttactagtgtgagatttaggacctttcgtctcacaatgcttgtgtgatgcaggcactatagcaggttcgggtttcaccttctttttcgtcgaggttttattccgaaacattggcctcaccaaccgtgagccacctactggaacagcccgggggctagatgttttcattgatttaccttttctctgctttggcagagttacttctacagaaataccttcaactccctctgatgacttgttactgatcacatcttggattctggttttatgaacattccctgtggtaggagatgctgatctcaaattcttcttggctgagctcttgctctgccccttactgatttcacttggcttacccactgaacttcctgccgatttctcaggcttcacagaaactttccctgccttactcttgtcatcttgctcctcattggtttgaactgcaacagagccatgtagcttcttgattgctccagaatcagaaggggtggacacccctgtcggttttgacagtctcttcatggctgccatctccgacgcctgtgagatgcacatcttcctcagggcctgcttcaggctcacggactccacaatctctgagctcgacactggcgacttcccaagcgcaataagccgcctatccgtgctcgtctgcccagaagccctcgccgacgtgcgcacgttgatcgatctgatgagctggtcaagatcatcctccaccgagcacgaccgtgccccaagctcctgccccactggcttgaccctcaccctcaagtgggtaagcccacacgaacgagcatctttcggctcgtccaccagttcgactatctccgagcacccaggagaacccatccccttcgagccttccggttccacaagctgcatcttcatctgggtgggaggccgtagaagggctgccgcatttcaagtcatcaggaccgacggttgcctgcacttaggtggccgacgaagccgctttcccgggccaagaaccggcatcacggagtccggacggcggcacccggggccgagggcgctggcgcggcacgcgaagggtggcggcggcgggagctgctacggctcgcgctcggtcggcggcgcgggttgctcccacttggagaagctggctgctgcgagcgaggatttgctagggttttctggccgaaacggcggcgaggagcggcgagagtgggggagtggcgtggggatgaggatgagttcaagcgggcgaaagcggcagcgctcggcagcaatgagcggcgcgcatcacgaggagcagatgatccagtggcctcctctcgctcgcccccttcttcc

SEQ ID NO: 5088 - DNA, 1461 bp, Zea mays
gcacgagacggcccaagagacgcgcaatgggaatccgacccgagtccgcttcccacgccccgcgcttctcttctcttctcttccccacacgaactcgccctctcgactctcgagagatagagcgaggcaccaagaaggggaaaaagagggacaggaaaaaaaaatcattctcgtttcgcgctgtccgctagaccccgcccgaatcaatggagattagggctccgccgacgagcctgaggctcgcgccgccgcccgcctccgccagcttccgccgaaccccgcttaggacctccttccttcgcggcagcgtgtcacttaaagttgtgcaagtacggcagtcaaatgtcaacagatttaagtgcaatagcatacgaagtaacctctttgataggctaacaagggttgtcaggtcctacgcaaatgcagttctaagttcgtttgaagaccctgagaagattctagaccaggcagttctggagatgaatgatgacttgacaaagatgcggcaggccactgcacaggtcttggcatctcaaaagcggcttgagaataaatataaagctgcagaacaagcttctgctgattggtatcggagggctcaacttgctcttcaaaagggtgacgaggatcttgctcgtgaagcccttaagcggcgtaaatcatatgctgacaatgcaagctccttaagatcccagcttgatcagcagaagggtgtagttgaaaatctgatttcaaatacccggcttcttgagagcaagatagcagaggccaagcagaaaaaggataccctaaaagctcgtgctcaatcagcaaagactgctacaaaagtgagtgaaatgttgggcaacgtgaatacaagtagcgccctttctgcatttgagaaaatggaggaaaaagttatggcgatggaatcccaagcagaggcactcggccagttagcaactgatgatttagaaggaaagtttgcactgcttgagacttcatctgttgatgatgatctttcacaactgaaaaaggaattgtctggaagctctttgaaaggagagcttcctccaggcagaacagcagtcagcaactcaggtgctgggcgccctttccccgacctagagattgaaagcgagctaaacgagctgcggaggaaagccaaggaatattaggttcattccttgtcgattcagcaggcctgacggaatctcatttccaagaaaatatagtgcagctgcagattgctccattgcgcgtttcgaaagttgaaacacaagtgcgcattgactgtttgttaaagagtatggaatcggctaatttctcggcattttccccctcgagtgacatttgtacagctatccataaaattgttgtaaatcactactctctctagagcctttttttgcatactatatatatagtcaaagttcgaagttcccaaaaaaaaaaaaaaaaaaacgcaatactcgtgccgaa

SEQ ID NO: 5089 - DNA, 3329 bp, Zea mays
atccttcccggcacgtgcgtgtctcccatcgccaggtagatccctttcctcacgccacgccgagagagaaaagatagagggagaggcaagagtcgcatcgcagacccagaccacgccgccgccacctccgccgccacttccgccggtgatcgagtcgcgtcggcgctaccttcaagctagaagacaataagcatcggcagacatgttcggctccaccaacccatttgggcagtcgtccacaagcccatttggccagacctcgtttggaactccacagggatttggccagtcttccactgctgccaacaatccttttgccccaaaaccatttggcagcccgaccacagcttttggggcacagaccggaagctcgctctttgcaactacatccactggtgcctttggccagcagcaatccactcccgcatttggcacaacatccactggtgcctttggccagcagcaatccactcccacatttggcacaacatcctcatctcagtttgggagctctacaccagccttcggtgcatcccccactcctgcctttggtgccacatcctctggatctttgttcggacagaagccaagttttgggggttttggatcatcttctagccagtcaagtccttttggtaacacgttccagcaaacacaaccaacatttggcagcagcacttttggttcatcaactccgccggcgtttggtgccacggctcctgcatttggcacaactacaccagcctttggcaccacaactgcaccagccttcggtgccacgactagcccagcatttggttcaacttcaacatctttatttggtgcttctagcgccccaatgtttggttcttcagcctttggcacatctgctactggttttggaacttcagggactacagcatttggtgtgagtagtactactccgggttttggatcatcaagcacaccttcatttggcacatcagctagtgcgttcagttttggttcgtcaccatcttttggacaaacagcagtttcctctggtagcactccctttggaacaactccctcaccttttggtgcaccagctcctgcgtttggctcacagacagcagcaccaacttttggacaaccacaatttgctaatcaagctggaggaaccagaataaaaccttattctcaaacaccagatgttgacagtgctactagtggtactcagcctgctgcaaaacttgattccatatcagcaatgcctgagtacaaagagaagagtcatgaagaattgaggtgggaagactaccagcgtggagacaaggggggaccgaacacttctggaactccaacattggcacctagccgtccttctcctataccggataacacttttgcttcgacaagtaatccattctcaacgaacccattttcaacaaacaacccgtttgctcctaagcccactacaactactagttcaccattcaacacctcatttaacaatgcatcagttgcaagttcgagtctattcacatcatcccctggtaccacaatgtttgggcaaccaggtgtttctacacttccagctccagcaagtaattcaccatcattatttggaaatatcaatcctgctcctgctacatcgtcaatatttgccacgtcagtgacgaataatccaagtccattcggcactggcacatcattggctaacactcaatcagccccactattttcctcagcatttgctcaaccgacatcaagtacaccggctttctcctctgggagcctatttggctcaactaatcctggcagtctgtttaccagcagcggtccttcacttttttcaacaccaacatttcaaccatctgcccctgctcagagttcgaacatgttctccttccaacccccaattcaaccagcagcttctaccggtggactcccttttttccccaacacaaatcaggccttgacgggacagccaacttctagcctgtccagtatggtcatgcagcctgctcttgtttcaaatccatttgggatgcttccagcaatgcctcagatgtccatcgggaatggtggatcttcaccttcagttcaatatggaatatcaagtttgccggttgcggagaagcctcttccaagtagatcattgtccatggcggttcctaggcatttgtcacagagaaggataaaactgctgccaagaaaatataatccaatatctgatggcaaggttccattctttgctgatgatgaagaatctccagcaacaccaaaggcagatgcttttttcatccctagagagaacccaaggaacctggtaattcgtccaattgagcagtggtcttcacggagagaaactggccggcaatatactgcaaagaatgttactgattcgaacaaatatgaagatgcttccattgaaagtgagcgtggtaagtctgccatgtcaccaagcagcaggccacctgtagtggaaaatgacaaacagcatgaggccagggccatggctcaacatgcgaatggaaatgctacttcagttgagaggctgttgcctaagcttccacgtgcagattacttcacagagcctagtatagaggagcttgcggccaaagaacgtgcggagccaggctactgcggtcgagtgagggacttcgttgtgggtcgacatgactacggcagcatcaaatttttcggggagacggacgtgaggtgcctcgatctggagtcaattgtggagtttaacgaccgggaggttattgtgtacaaggacgatagcaagaagccccctgtgggcgaggggctgaacaaggctgcagaggtgactctactgaacatcaagtgcgtaaacaagaagaccggggagccgtgccagggggcaagagtggagaggtacagggagatgctggtgaagaaggcggaggagcagggcgcagagtttgtgtccttcgacgctgtcaagggagagtggaagttcagggtgaagcacttcagcgcctacgggctttggtgaaatcctggggagttaagtagtttgtttgttctgatggagcaacgctttacgctcttgtcaattaccatgcttggatctgttgtgctgcttctgtacaatgttgctgctgttaaaatgcttgcaaattgcactgctctgctgctgaaaacaggagcagcagtagaaactaccgcaacaggagggcgtgctacctgctactgttatgtattattattattaactatattctaagtataataagacttagttttttaaataaaaaaatattactttatgcacttagatatatgctatgtatggagagagaataattatgtataatagtttataaaatgatcgtaacttt

SEQ ID NO: 5090 - DNA, 6084 bp, Zea mays
  misc_feature (5846)..(5846): n is a, c, g, or t
cttcagcgttccaggaaattgttgatgcatatggtgtagccaaatatcaagaagcaaatcctggagtattcaccatcgtgactttcccttttctatttgccgtcatgtttggtgattggggccatgggatttgcttgttacttgcaacactttatctgataatacgggagaagaaactagcttcacagaaacttggagacataatggagatgatgtttggtgggcgttatgtaattatgatgatggcagttttttcaatctacacaggattaatatacaatgaatttttctctgttccatttgggctttttggtaaatctgcctatgcatgccgtgattcttcttgtagtgatgctactactgaaggactaattaaggtaagagatgcatacccttttggtgtggaccctgtttggcatggtagccgcagcgagctgccgtttctcaattcactgaagatgaagatgtccattcttcttggagttgcacaaatgaaccttgggattgtgatcagctacttcaatgcaaaattttttaggaacagtcttaatgtgtggtaagtttattcaccttttagtagacaatttgacattccattttgagatgaggactacaacaatcgtgaagaagcatgtgatcctttaacagcgttgttacagacaacagattatgatttttccacgcttactcctttgaaacaggtaccagttcattccccagctgatcttcttgaacagcttatttggttacctgtccttgcttattattattaagtggtgcacggggtcaaaagcagatctataccatgttatgatctacatgttccttagcccaacagatgagattggtgaaaaccagttgtttagtggccagaagacagtgcaggtctatattccttgttgataagttctcttctgtgaagcagactggtctatcatgcctaaccatttttgccttttccaatgcagcttgttctgcttctgcttgctctggtgtctgtgccttggatgttgattccaaaacctcttctactgaagaagcaacatcagcaagtacgttcatacagtatcccacattctatcggtgacttgatgttatgtggctgcagttcacttttacactgactgtttttccatttcttttcgatcagaggcatcaaggtcaccagtacgctatgcttcagggcgttgatgaatcagtgggagcagagctgggggaacatcatgaggacgcacatgaccacgaggagtttgagttcggcgaagtttttgttcaccagctgattcacacgatagaatttgttctgggtgcagtctcaaacaccgcttcataccttcgtctttgggctctgaggtaatgctattttaagcagtatctttatttacacagcctcacctatgcacagtcccatacttcctttgtttggctgcaccctaatccacataggtgcattggagtgcagccaaacaagtcatttttattacctcactggctactaacgtgctactgatattctcctttcagtcttgcacactctgagttgtccactgtattctacgagaaagtactaatgacggcatatgggtaagcaaacaagtctctggagccattaaaataaacatcttcgcgcattctgaaatgccattgtttcttgtaggtttaacaatgttttcatccttattattggtgtcgtcatcttcatctttgccacgattggtgtcttgcttgttatggagaccctgagtgcattccttcacgcgctgaggcttcactgggtggagttccagaacaagttctatgaaggtgatggctacaagtttgccccattctccttcgcgctgattcgtgaggaggaagattgagcttgtctcaacatttgtatttattgtagccgataaaaaatctttggtggcctttgttcccagaccaaatcattttttcatctgttgtgtcggatgtggatcataaaccaccgtccctttgtttaaactgggacgaacagcatcatttttccttagctatgcagaggattcttgggtcggttggcaacagatatggggtgatgtcacccttgtatgatgctaataagtagttgccgattgggcggtgtgttggatataaataagcactgtattgaaggttagacaatctccatcacgttcattgtcaataaaataaagagtgctatttacgctgctggtgttaatcatctcctggtctgttgttaaccattgtcagtgcttcatcttatcccattgatactctgaatcagctgtctcttataaccaaagcaaaagctaaaccagaatcacgttataaaagtagttaaacatgtcgagtctgtctgcttgtgggcaatctagtaacataggtagctgcagcctagtttcgtcagtcgtcaacgacgttgggaacgctgctggtgctgcgcctagagctgctgaaaggtcccgtgacagtccggccaacgaacttgccggccttgctgagtccgctaccgaacgcgccaatgccggagccgacggcgccgatgcccgtgccaaccatcccaacgccggagccggccgcgctgacacccgtgccggcaacggtgccggccgccgcgatgcccgtgccggccacgttggtgaccgtggacgccatgccgcttgccgcgtccgcggcgccgctgacggcccccgtctcgctcttcaccttccgccgctcatccacggtctgcttctccagctccagggcctcccgcgcctctgcgttggtgaactggtggtacgccacctgcaatacagcttgcaagaggaacgtcagacaaccgctgcgaactgaacacggaaaggacgaggttgatcgatcctgccttaatgctgagcacgcccctgtccttcttgtccttgaccttggtcgtgtccagcgacgacagcagctgcaggtccacctcctgcacggtttccatctccaggtcgctcaggggcagcttggcgatgccaagcctcttgtcttgcttcatcttgtcctcatcgaacacctgggagggcagagaaaaaaagaagtgggtccttgccttaggagtacctcgctggaaggaaacaaacaagcagtgaggtttgtcagctcgtgcccacctcaagaattagggactgcgtctccttgtcctccgagatcagatggaacgtttcgttccaatgggggttgaggttgtcgtcaatgacgctggtcttctccttgaacattgggcggatgaacaagaccacgtaggggtcggatttgccgatgagttccttgttcttgagggattccgcgcggaccacagtgacagtgagcttcccgtgcggcttcagctcgaggtcactgcacaagggagcagatcacatgtgtctgtcattcaaacaacttttccaagtcgaaaagattaaacaacttcatgcacacgattcttagtagtagatcagactctattaacctgacgtctacgtcgactccacccagtggaacaatgattctgtgtggccactggagcatgtcagtgatcaatgacgccaccgtgtcctacagaagaataacggtgaaatatggttattttttcccttccaagatttgtagatacgaataaaacaagaggtgaaaacaaaagaaattaatttcatacgtcaatcatgtctgaaagcccaggcattgcggtcaggcttcctcccacggctttcagtatgtagtcgatcctcggttttggctgcaattgcatgaaaaccacgcgtctcaaaaaaaaaaacgcaaagaaacaaggcatattttcccttggcattgaaacaaaaagaaagattgttctcatacgcagcatctctgacaacgaagtgtttacgaactagaattcaaaaatcgaagcctatgtaacagaggactagatgcgtttcagtagctaaaagaatcacacctcggccagaagagcaacaacgacagcagatatgcatggtatctcgtccgacaactggaagacaacacggatgatggtgtacacctgaaggttcttaaactgtacacacacatacaaacaaacacgggaaaaatgattagtagaagatgcggaaacgaaatttgaggtttaaacatgagctcctgttcttttggaagagcgtcagcataaaatctcataccgcaggcaaacaattgtaaaggagtccaaaatgatctaactaagaaaatgcgtttttttattggtatgcttaagctgtaattaacaacaccagtccacacatggccaggcagctgatcctagcccgtctgaaatcagacatcgcctggccaggaactcataccacaccaccatccattcacgccctatttatacgtgcaaatactttcacgataaaatttgacacacttcgataaaaatgtgggaaattaaagctgctaatatcccttttggccacgggtctgtggagatctgcaaacctgaatgggaagcgaagcaacaagtgtctcgactgcaagaatgatatttggatccccgccccagcggaagtccatgtccattgtaatctgccctttcttaaaactgtgaatccgaatgcctgagcacagaatagcttaagtcatggccaaatcctatgagagcgtatacaagttgacaccattttgtcttggcaaccttctattttcggtggaacagtcccaagggagagcctgctgaacttcagcgaggatatccctggtggtcgataatcatcgagtatcggttcgacagaatccctgatgaccatggttgctgcctgcaattagatgcaactgcgaataaggacggttgttggcatcaaaacggtagatctgtatgtttcttaaaatgtaagtaacttcgtcctaaactgtttgcccgcataatgaagttttctgaagaaaccaaagctatcaatcttaccgcttccacgaagggccaaagcttgctcaactgtttgttgagccatttgacctgaaaggagaaccaaaaaaaatatataacaagggaaacatgcaagcaacagatcaagggggcatgtatactgtaggagaagcaacagcaagatatggaataggtggatgtgtcatttcccaggttttatgcatcgaagagttatgaagttcatagatatgggctgcaaaaagttttctctctgcggaagtttttgtctagcaattacaacaataaaaattcagataacttatgcgatagtcaatagcttgatatcacgggacattttacggttccatgattatatctacaccaaggcaggtagcatttcacctgttcgtattctggaaatgatatccactggggaagactttctccacatattttcttcacgtcttcacggttgagagatcccaacgaactgataaccgcagcctgtttcaaaacatgccattatgttgaaatttatcccaatcaataatgcacaaattcaatcaaaggcatacagcacacttttaacaaccgatctgtatttaacaacacccaaaggcagaaaaatcaagaccagataaccgaaggatgaagatcgaaactttttatgatcgcatacatcgaatcggaatgatgtagcggcacctaccttgttgctgcgtttggcggcgcggcgagccatggcgcgtgcccagcctgcgatcagggcgacgccgacgatcatccccattacgactcccgatatgaatcccatttcttctgtcttttttttctcaacgagccgagaaagagaggaaaccacggaggaagacaaaaatttcaagtacaagattatctattacgtacggaaattcttggatcaaatcgtagacgattgtctctccaaattgtttattacttctaacactgcatttgggancaattttttcgcgtgctactagtaataataaagagaggggagagacgagagagagagagggtaatgtgcgaatggtgagaaggttgtcacggcgaattttgcatggctggatctctgcgatcagtgtgcttgacgagcctttggttccacacaggcccgatacttacatggaccaggcccatatagcgaaactaaacttgaagaatgaagactcttaatataatcatcataaaaaata

SEQ ID NO: 5091 - DNA, 1419 bp, Zea mays
aaccctgcttccagtgcaagtgactgaccccgtgacccgacccatcataacaaatcaaaccatcacccgatttgtttacccccgaaaatttgccgtcttctcgtctcgctcccctctttgcgccgcccccagatccggcaccgcccgctgctcgaacccgcaccccacgcccgcaggccgggaccggtgggcgcgcgccgggcagtaggagggagaggaagggcggcatggcggcgccgccggcgagggcccgggccgactacgactaccttatcaagcttcttctcattggggatagcggtgttggcaagagttgcctcctgttgcggttctctgatggttccttcactacaagctttattaccacaattggtattgactttaagatacggacaatagaattggatggtaagcgtataaagctacagatttgggatacagcgggccaagaacgcttccgtactattaccactgcgtactaccgtggagctatgggtatcttgctggtttatgatgtcaccgatgaatcttctttcaacaacatccgaaactggattcggaacattgagcaacatgcctctgataatgtcaacaaaattttggtgggcaacaaggccgatatggacgaaagcaagagggccgtacctactgcgaaaggacaagcacttgctgatgagtatgggatcaagttttttgaaacgagtgccaagacaaacctgaacgtggagcaagtgttcttctccatcgcacgtgacatcaagcagaggcttgcagagactgattcaaagccagaggacaaggcaatcaaaattaacaagccagaccagggttccgaggcaccagctgcccagcgatctgcatgctgcggttcataagcagacgcacgatagccataatcattggttatttgacactatttatttcctgcttggcttttataggaagaatttgaggaagccacttatgatatactgatgatgtggttgtactcttgtttgcttccactcttcgaagcaaacacctcttgctgttgacgtagctattgcactctggacatccgttggaacaacctctctcctccctacagactacagtgtgtaatggacgaattccatgccgttgggtttgcattatcgatcaatgcatggattaacgtatcgcccttgtgtggattgttgtgttttttttctctcatgttgctgttcctttagattgaatttgttgggaaggaaaatatattttccttttcttatgtatatcaggtgcatttttatcttttgtacctggaatgtatgtatccacggaaagcgtgaatcttcaatttagaaaagaagaaaacttatctggaaatataagaccagtgcatgcggtattgtttgaataaaaaatataataaaacttatacatttgtatatctct

SEQ ID NO: 5092 - DNA, 1491 bp, Zea mays
ggcccatattattgtgcttatatatattataacaagtcctaagaactaatcattattcctctaatccaaagtttgtaacaacatgttttttttggtttttttttttttttttttttcaaccaaacgtaggtagtcttattgcaatcttgagtttagtctacatagccataaaacacaacaatatgagaaaagaggcacaggaaaataccatgaaggcatgaagcagctcagccagtgatcatggtgcctgtgccctcgtctgtgagaatctcaagcagaagagagtgtggaacacgcccatcaatgatacttgcggtgtgtacaccttgtgccagggcgtgaacacagcactccaccttgggtatcatcccaccagctaccttcccgtcagccaccatcttccgcaccccagcaatgtcgaccaccttcaccaggctcccagggtcattacggtccgccaaaatgccagacacatccgtgagcaacagcagcttctcggcgcccacggcagcggcaatctcgccagccgctgtatcagcattgatgttataggcttgcccagtctcgtcggcggcaacggtggcgataaccgggatatggcccgcggcgatgatgggatggaggacggtggcgtccacgcgcgaaacctcgccgacgaatcccagcgccgctgcatttggagacgggcgagcggtgataaggcgcgcgtccttgccgcacagaccaatggcggtgcctcccgcgatgttgatgagggaaacaaggtttttgttgaccttcccgactagcaccatctcgacgacctccatggtgagcgcgtccgtgacacggaggccgtcgcggaactgcggctcgacgccgacgcgcagcagccaggaattaatctccggaccgccgccgtgaacgagcacggggcggaggccgacgcaggagagcagcacgagatcgcggatcacggacgcctgcagctccggggacttcatcgccgcaccgccgtacttgaccaccaccgtcttgcctttgaatcgctgaataaaagggagcgcctccgagagcacgtccactcgactcagcgacgcggtggcagcggcagccgacgaaggagccggcgcagccgtggatgtggcggagatgcggaggcggctgcgacggcaagtaggggcggcaacggggcttgcatggttggagctgagagtagggctcgacggcggcggggatgggactggaaggagcgagttggagaggtagggtttcgtgaggaccatggctgcggtggctggggctcgagctcgactcgccgctggcgttcgacgaaatgtttagaccgaaaggtttagaccgaaagtttcttctgacgcggcgttactttccgttatcctggctgctggacacgattaagtttctaaatttaaatttctaaattcccaaataagaaatttttagttttcgtatttgttaatttaaaataaataaaatagagagactaaaaaa

SEQ ID NO: 5093 - DNA, 1313 bp, Zea mays
gcggtgggctccctcgcggccggcccggaccccagcgtagcggagccggcagccaagcagaaaaatacgagtatcgcacgcgcaaggcgattccgtccccattctccacccaatagggagctagagctacgagagggggaaacggggggacgggaataggcgtcgtcggccatgtcgtcgtcgtggaactcggtgggtctggcgatcctgtaccaggtgctgggctgggtcgccttcgccgcgtggtccttcagcttctacccgcaggtcctcctcaactacaagcgcaagagtgttgtgggcctgaatttcgattttctggtgttgaacttgacaaagcactcgtcctacctcatatacaatgctgctctcttcttcagcccattcatccagcaacagtatcatgacaaatatggtgacaaagagatgattcctgttgctgcaaatgatgttgctttttcactgcatgctgtagcattgacagcctttaccgtttttcaagtattcatatatgagcgaggaacacagaaagtctccaaagtttgcatatcaatttctgctattgtctggatcgcggctcttgtttgcctcattattgcttggccaaaaagtgactggctttggcttattgatgtattcaattcaatacaagttggcatgacagcaatcaagtacatccctcaggccatcatgaacttcaggcggaagagcacaattggttggagcgttggcaatatattacttgatctcacaggaggggtgctgaatttttgtcagatgggtgtgcagtctatagatcaacatactttggtgaatttctatggaaacattgggaaaacccttctttcattggagacggttttctttgatgtcctgttcattatccaacactacgtgttgtaccctgtcaagaaggacgagaatggtaaggcaatcatttctgaaagggtagccccccttatcaggccttcggacaagcctgaagaagataacgtatgatctagctgtagttatattgcgcacattgcattcacgcgctgtttgcacacaggccacacacgcatgcgaattatttgttcaaaaggaattgctggcgcgtcttgattatattactgcttataacttttactacttggtgcactggtgagagatgtctcatataccaggttgcgggtttcaagtggccccgtttttattatcgtgatttgtgaaggttattagatatcatctcggccaacatttacgatcaatgctcatgtaaatatttggttgcattacatttctatggtttcataaaaaaaaacacacacccc

SEQ ID NO: 5094 - DNA, 955 bp, Zea mays
ctatagatctagtaaaacttatgattggttgacaactgaaaaaacaagattatttttctttttgagacagtggaagcaactattagacaagtcaagtttaacagtacagtacacgtgaatacttcgccctcaagtcctcaacccacacaaccaacaaatacgtgtagtactcatcagatctatacaacgataaacactcacctgaaaaaggacagaaggtgagcacagataccctgctcaactaacagttgatgcagtctatctcttcaacactgctgtgcatgaagtaacccacacaaactgcaaccaatactattaccgggatcaatagcctcagcacaagccacagcgtggaacccttgctaccatcggcagggaagaatctcctaagcatttccgccagtggccataagagctcacgcttcttgtttactgcctgactcatttggccattatcttccgtgtcttcaagcttgctcaacttggaaatcatgttgccatataatttggcatcccttcttttgtactccttgaccttctcctttagcctcttgtaccccatcttcacatccctgttgtcaggatctatttctagagctttcttgatatctgcctctgccaaatcaagatcaacaagatgcatgtgtgcctgtgcccttctgtacaaggccttcacgtttgtgttgtcagattccaggacctcggtacacagttcctttgcttccttgtaatcattaagtcttagtttacatgcggcattgttgagcttgcagcttatctgaagtggtttcgatagctgcttctcttcttcagtgaaggagctgtcgcgctcggccgaccccgaagccttttcatatctcttagaagccctggcatacttgccaattttaaaccacacattcccttcttctttcttcttagcagctgcttcaatcttctcagcaacgttcttcaa

SEQ ID NO: 5095 - DNA, 1384 bp, Zea mays
cattgggtacctcgaggccggccggggcctctgatgagtgagcccatcagctcgcgtctggctctcgcaggcggcaggtcgcagagcagcccagccccagacccacctcgtccgcttcgtcctctcgtctcctcgcactcgctagctgacgctgcgtgcgccaaaagcagcactgcagcagcaggtccagccgtcgccgttcccacttcccaccactgccacgcgcgccccggatcgagggagggcacgcagacgcggaggagggaggatgagtctcttcgggcttggacggaaccagaagacattccgccccaagaagagcgctccatcaggcagcaagggagcacagctccgtaagcacatagatgccactctcggcagtggaaaccttagggaagctgtgaggttgcctcctggagaggatatcaatgaatggcttgctgtcaataccgtggatttctttaaccaagttaatatgctgtatggcacgctcacagaattctgcacacctgagagctgcccgacaatgacagctggcccaaagtatgagtacagatgggctgatggtgtgcagataaagaaacccatagaggtatcagcaccaaaatatatggagtatctgatggattggattgaaggccagcttgacgatgaatccatatttcctcaaaaacttggcacaccattcccaccaaacttcaaggaagtagtgaagacaatattcaagcgcttgtttcgtgtttatgcccacatctaccactctcatttccagaagattgttagccttaaagaggaggcccatctcaatacctgtttcaagcacttcattctgtttacaaatgagtttggcctgattgacaagaaggagctggctccactccaggagctcattgaatccatcatcgttccttactgagactacggtgtagtaaacgtggatatagagctctcagtgcagatggctgtgaagtgtccatccgtgacagaacttcactgcatagagctatatgtgcatgtacctgtgtgtttctaaatgatcatgtattggccatgtaagtgtgcctgttatcagttataaaagggtgatgatgatcatgtactgcaaaaagagaaagcacaagaatgtgttggattgatgtatgcagtgtttattttcctcctggttgtggaaccgtcagtttgtctgcttattgctagacattctctccgttctataaattgtaggtcgttttaattttgctccaactttgatcaagtttacatgcaaatatttcgacatgcaaaaccaaataaatgtattgtcaatgctcccacgatttaatgtaactactctcatgtactaaaaaaaaaaaaaaaaaattcgagactagttctctcctcgtgc

SEQ ID NO: 5096 - DNA, 3433 bp, Zea mays
ggtgggtagaatctgggtgtttggatacgcagattatgagattgtagattctgattaaaaaaagaaaacagataaatacaaacaaccaactagtgcattaattccgttggggcctgttgtatgcattgacagcattagaaatacatgttggcattctcttagtgctatgagttggtattctgtattaatttttataccaactgtatttgacatcaattccgctcgaattagtttattttttaaatatcatgtaagtttgtgtttgtttttttatccggttagaatctaggtatttggatacgcagattatgagattgtagattcttagtgaaaaaagaaaataggcaaagacacaataattaaaacctgattaaaattatacatgatttgtctattacaatataactattgaccggttcagataacaaaccatgacactaagcattagctttttttcggcatggatgtaaatggcccgtatatctatctaatataatgctcgtaattaacatcacggctaaagtgttgatgattactgatcgtcctagtacagttagtgcgtatttaccagtaatataatcgatgtgggttgagataaagagagagtcagacgtacgtacgaagcagatgagaccaggattcacgagacttcacacggacgtggtgctgagctgcttctccgcagtcgttgaaaacctgcttctcagaaaatcggcggtggctagaatcacctcagaatctagacgtttggacaccaaaacccgcttatggcggccagaatcggctgaaaagtcgaaccaaacacgggccatgatggatctcagctggagtccacttcatggtaaattctaaattcaaaaaaaaatattagagaaaccgagcataaacataatgtagacggcaggcatcaaagcaagtgtatgcatggctctggcctacacccacgtactacggcggcggcggcagcagcatcggagttgagagtaccgtcgcacgtgacgtgagacgttcaatggtccatccatgatatggatggaatcatttgacgctactactacgaggcgggaggggagatgataagcatccctgctactgctactgctacgcaagcaggccatcaagtttggcacgcgcgaatatgttcttcgttagctttatatatagaagaataagaaatatatactatgatcttatggtcgctatgtttgtgcgatgcgttgtcgatcgctccctccgactgtattattaacgtgtgtgtgtgtgtgtgtattcagatagatagatgccttggtcaagagcatctgcagtgcctcaatgaccattagctgtatacgtactatggagcaataatagagcgccacctgatttctaattatttggaccataattaagcactcgacattgatttcttaggctcaagggaaatcgaaatgttcgatccaaccattattccaagatgcccagatagattagatagaaagcgagtcaagtaacggatggagcacatatccatccatttgcttgccgcccctgctccaccaccatcaccgtaccatattatcctatcctatcgagcaagagcacagatgccctcagcctgctctcccctcgcgttctcgccacggcctacggcgctatatataaagcagggggaacccccgaccagccagacccacacaaagccaaggcgcggcgcagccagagtaagcagagagttgcactaccgtgcttcttcagttcttcttcctagtatgcactcgcttgtgaggcgtggcaatggctacggctacggctatggtggttacggcagcagcaatccccatatgaactaccaccgccaaaacaccgagtccgtgaccaccgtcgtcacggagatgaaccgaatggccgtcgacgacaagccctgctacggcggcggcgtgcagaagcaggcctgcaaggtggaggcgttccaggagcacgacgaagcgtacaagggcgccgtggccgtgcagcagaagcactcctccttcaaggaggacaaggaggaggtgcgcggtgctgctgccgccgtcagaagctggcacgacgagttatacaaggaggaggaggaggagaagcgcgtcgtcgacacggagtacggtgcccgctacgggggtgtggccgccgtgaagaagccgggctacaactacaagcagcacgaggcatacggggagaccgaaggtgcagggtacggctacggcgccggcggcgtgaagaagcaagcaggctacagctacgcgcaggaggcgtgcggagagagctacggcggcgctcaccacggtggtgccggtgccgtcgcgcagacgtacgcctacgaccagcagcaggcctacaagcacaagaacgcggcaggggcgggggcggggtacggtgctccctacggtggtggcgccgtgcagcagcacgacggacacaaagatgtgtaccggcacggcgccgccgccggtggcaaagtaaagaagaacggctaccagtaccaagaggcgtacggcggaactgacgcaggagggtacggtgcgcactacggcggcggtggtggcgccgtgcagcagtacgggtacggcggcgccactaccgatggcaaagtgaagaagggcggccaccagtactacggcggaagtggtgcaggagggtacgactctcactacggcggcggcggcggtggcgccgtgcagcagtacggcggctaccataaagatgcgtacgggtacggcggcggcgccaccgccggtggaaaagcgaagaagagcggctaccagtacgaggaggcgtacgctggaactggcgcgggaggatacggcgctcactatggtggtggcgccgccgtcgctcagaagcaaggctacaggcagggcatatacgagagcgagagcgagagcgaaagcgagagcgagagcgacgagagcgactgcgaggaggcgttcctgccgcacggcggccggacgccgcagggcggcgtgcagcacagctacggctacgggggcggggcgtacaagcacggggctggcaacctcggcggcttgcgccgctaccagtcgtacgagagccgcgaggatctcggcggcggacgccgctacgagacctaccagagcaccgtccagtacaccggctccccgaccaagaaccgccacgtcctacgctacggcgcgtaggcatatatacgctctgatccagttgcattgcagcacgtgcacctacgtatattcctatgccgcgtcgtgtgactcgtgtcgtataggcaggcggcaccgctacttggtgggccttgtgtttgctggtgcagatcgaaaaatctgacaataagatgtacttaatgccaccttgatataataatgtatgaagacgaaactttgaaaactgttttacgcgggcggccgcccccgcggcggtgctcagtactgcaggcatgcaa

SEQ ID NO: 5097 - DNA, 1805 bp, Zea mays
gcacgagaccattacctagaacatcctaatcgaaaacataaatagcaagggccttggattgtttggccagggatagcacgccgaggaaggtcgacatgtcgtctccgccgccgccggtgaagctgatcggcttcttcggcagcccgtacgcgttccgcgcggaggcggcgctgtgcctgaaaggcgtgccgtacgagctgatcctggaggacctgttcggcagcaagagcgagctcctgctccaccacaaccccgtgcacaagaaggtgcccgtgctcctccacggcgacggcagggccatctccgagtccctcgtcatcgccgagtacgtcgacgaggccttcgacgggccgccgctgctccccgccgacccctacgcgcgcgccgccgcccgcttctgggccgacttcatcgagaccaggctcaccaagcccttcttcatggcgatctgggtggaggagcgcgacgcgcgcctgcggcattgggtacctcgaggccggccgggagcgcacctcatctcgctccaagcacaccaccactccacagtgcacttcactctacagcaacgacagaaaagtgagcagcagacagcagcagctgctgccatggaggcgtggagatctctcctcgcgagcttcgtgctcgccgtgctggccgcgcaggccttggtggccgtggtcgagtccaggaccggccccgtggagcaggcgagccaaggtgacgacgtgaagaagccggactgcgtgccggggatggacccgcgctcgttcccagggaccggcggcggccacggcatcacgcccgtgacgccatcgcacggaggctccagctccccgacgccgtcccacggcggcggcggcgggtacgttccaacgccgtcgcatggcgggacgctgcctttcccgtcccacggcggctccggctccggctcctctccgacgtcgccctccaccggtggcggctcgtacggtggatccccgtctactcccggaggcggcgcgtacggtgggtctcctccgtccacccccagcggcggcggcgcgtacggtgggtctccgtctacccccagcggtggcggcgcctacggaggcgggtccccctcgcctgctcatggtgctggtggcgcctatgggagctctccgacgcccgcgtacggcgattcccccttgcacggcggcatcgggacctcgtcaccgacgacatttgtccccatggacccccacagcttcggcacctgcgactactggaggtcgcacccgatggagatctggtcggcggtcggcggccggttcccgagcacgtcatcgtcgatgggccacttcttcggcgcggcggcgggcaacgtgggcggggctgacgtgatgagcatccaggacgcggtgggcaacacgcgggcggacggcacgggcgcgctgctgcgcgagggcgccgccgcgctgctcaactccatgacccgcgccgggttcccctacaccacggagcaggtccgcgacgctttcgcggcggcggcggcggccgggtccgacggcgcggccgcggcgcaggcggcggccttccggaaggccaacgagggcaaggcgtagctgcctgtgctgtgctatatgcatgcatggttaattagttggagtgctccggtcgcttaatctgttggatttggtggtttgttggttgtgtgcgcgtgtgtttcagtgatttgctcctttttttttctttctcgtggatctatcgatggatgaacatgaatgaatgaaccgaactgcacagctccgttgtgagctgatgcatgcatgcatgcacatgcacta

SEQ ID NO: 5098 - DNA, 1406 bp, Zea mays
actcgcccactcccgtgaaccccaaaacccttcctccccaaacaaccggcggcggcgcgagggcttcgctttgcatccatggctctcgtcgccggctcctacgagcgcttcatctggggcttctcactcaaaaccctgacaaccccctccgccaccggcgcctcgccctccgagaccctcaccctcgcgccgctcttctcgtacccggcccacacgggcccggtgcgctgcgtggccgcggcgccgcgggcggggctggtggcctccggcggcgcggacgactccgtccgcctctacgacctcccttccgccgcggacctcggcccgctcctggacccctcggccgccgtctccgcactcgccttctactcccggggccccgtgccgcggaacctcctggccgcctgcgacgacggctcgctccacatctacgacgccgacggcttcgcgctgctctccacgctccgcgccttcccgcgccacgaggccgccgaggcgctcgccgtgcacccgtcgggccgggtcgcgctcgccgtcggccgcgcgggggcgcttgccatgctcaacctcgtccgcggccgacgcagcttcgcatgccgcctcgagcaccctgcgtccgcgatcgcctacgctgaggacagggatggcggggaccgattcgtgatggctgccgagaacaaggtcagcgtgcacgactccgtggatgccagggttattcatgatatggactgtggcaagaaggtgctcgccatggcgcccgcaaagagtggggtcctttacactggtggcgaggaccgttgtattactgcatgggatctgtccagcggcaaggtctcctcacgcattgagggtgcccatgcaactcgtgtaaaaggggttgttgtttttggtaatagcaatgatggatcacagctctccaatctaatttcttctgcttcgtccgatggtgtcataaggatatgggacattcgaacaatcgggaacggaaagcctactccattagcagaggctaatacaaaagcaaggctaacttgtcttgctggaacgtcactgaaatgactcaaggaacctacagtttgctaggcgtctgattctgcattgttagctgaattagaaaacctggaaatgaaagaagaaattgaaggtgaaagatctggcacgcgagcattatctgtgtgcgtttggaacgtatccatccattatgtacaccgacatagttttggcttagtgtctgagctgcataacttatttatatttgattgcgcgacaagttttgcaatgagaaccgttttcagtactaactgtgcaattgcatcacgtacgggactgagttctctgtcaagagagtcattgacgccacaagttattgcagtggcaatcatttccagtttgcatcatttggcatg

SEQ ID NO: 5099 - DNA, 2582 bp, Zea mays
cttcaagttccagcaacaccattgataccgagggtgctgaaactactgaacttcagagacataaagatactgcttgtcctggactcaagagacaagattcatcaaaatccgtacaagataatcaacatcctggacatgagaataagcaaccaaagataattaagaagatactaacaactctaagagaggagagcaaatttagggaaagcaattctcctgttagagctagccgtgtaaagctaaattcacctagcaatagagaacgctcatctgacgactcaaagcaaagtgatatttcctccagttcaaggtctagtgaagttatgtcacatgaatcagcaaatgcaagctgtgaacctgtcaaacgaggacatgcatctcctcccttgaagcatttggtaaggataaatggttttcttgtgctaaaagcgtaaatccatttctctaagtttgctaattcttgcctcgcccccctcgatcctgctgtcaccaattgttgagcattctccgaaggttaaaattaaagtagatgagctattacatccacaccttgccaagcaggttggagaagttgttgatgcagctgcagggaaggttaagaacagaacaccgcccatttttattaaatgcaccagtattcctactcggaggcaaggagtagcaagtccaagccgtcaacacactggggtaaagcgagctcacaataaggtcatggcagagcatgcaaggaatccttgtcagcatctccatagtccaagcaacgctcttgtgaaacttccaagtgttccaatggttcctccaagtcatctagaagatcttaagagaaaaccagacaatacacgagcaaaatctgctcctcctagggctttagcaaccaaggaagacaacagtgcttgctccagttctacgattggtaatgctgaaaacaccaaccagtctgaaccgtctgaacctgactcaccaacttatttggtctcatcctgcaaatgtttgatacctgacactatcatacaaaagcacggcataacaagtaaagcgagttcagaaatcatcacaaccaattgtgagaaaaaaatgactagtaatggtgatcttagtctaagcgccgccatggtgcaatcttctgatattcctgaacaagagtttatttgcaaggatggaatgctctccagtcaggtgggtcagtgcagtgaaacagttactgtaccaagcgatgaagacaagttcacagtgcgcgaactgctttcatcagtaccagatctttcttcctttgtcccaacaacaatgatgaacactgagccaggaagaggtcccactctcacccagtcatcagagaaaccatcgggtcctcatttaaatcctcctccagttgaggacattatacatgtcataagccacagcagtttccatgtgaatggtgagcaggcagtaaaagaaactggatcagagagcattgatgttgacaaacgtcttaacatggtaagagaagagataggtgtaagaagcaccgagccaaacctcataccttctggacctatagattctgatacggtgaagccaaatgtagtagaagctaatattacctttcagaaaccatccagtacagatgccataaaattgccaaccataccggaaggaaattttagtactctggagaccaacaatgggtttaagcaggaagcagctccggctaaggaaatactagatgtgacatccttcaggcagcgagctgaggctctggaaggtctcttagaactttctgcagaattactggaacacagtaggctggaggagcttgcgattgttctaaagccatttgggaaggccaaggtgtcccctcgagagacagcaatatggttggctaaaagtttcaaaggcttgatgaatgacgaagcaagccgcagttcaacgtgagtacgcatagcttttgtgccaccctttttactttggttgatttctgcttgtgctctgaagatgctatggttgtcttgttcatatctggcttcttggtatcgtgtgtccgctgtttccatttcgatagttattcattctttacagcacatgttgtaaatagcccagatttgtgaacagaaaataatacatgccagaaatggtgttaatttacatggttgaaaaaaaagagactaatttgatcaattattgttttgcctacgtgctcctctgaaactatcagaattctacgagaaaaggtacaaaattgtgttgttgcatttgttgtcagtatacttagtttctcaactactcttagaacatcccacaccacatatgagcatcttgattaaagtatgtgactatttagtaagccgatttagcatccgacacacacaagtcctttttgttcaggcagagttgcattttttgcagtaattatactccttcatttcctatactgaaaccgcagaacctacaccatataagcttacaaatccccccttgttatatgtgatgctcacactgttgggacttgggacggctttgttttatagcctctttgttttgtagccttactagctggttgcagttggagctccatttgttcccaagcagcttcgccactttct

SEQ ID NO: 5100 - DNA, 2504 bp, Zea mays
gttcctggcttgggccgaacaaccccgtattgggctaccgctgcagcggttcattttcaccacgcgtgcgctctctctgtctgcgacgactgggctacgccgccgccgccgtcctccgtctggtgccgaggtcttcgttggacccttcgcccgcgactagcgtccgccaggtgccaggctgaaggcgatggcgacggagaggaggcgcgcgtcagtcgtggtactgggcgacatcggccgcagcccgcggatgcaataccactccctctcgctcgctaaccaggccagtatggaagtggacattgttgcaaatggaggaagtgatcctcacttgtcactgagagagaatccatcaattcacatccacgagatgaaaacagtgcagttaactggaatttcaaagatatctggtgctctgtcacttctacttaaagctgctgtccagttcattttgctggtttggtttctttgttttaagattcctcgccctgatgtcttttttgttcagaatccaccctctgttccaacactggctgctgtaaaactggcaagctggctgagaggtgctaaatttattgttgattggcataactttggatatacattgctggggttgtcgcatggcagaagtcacattattgtcaaaatctatttctggtttgagaagtactttgggcagatggctgatggtgccttttgtgttacaaaagcaatgcagcatgagcttgctcaaaattggggaatcagggcgacagttctttatgatcaatctcctgatttttttcaccctgcttcattgatggagaaacatgggttgtttagcaggctagggaattccatgtgtagtgctatgggcaatgctgattgcatatcagtggaggaagtaggggaagacatgaacactactgcctttaccagtaagattgatggccaagttttcttgaagcctaacaggccagcacttgttgtgagcagcacaagctggacgccagatgaagatttcagcatacttttggaagcagcactaatgtacgacagacgcgtcgctgcagctttaggtgaagatgattcaatggatgaggggcaactttggattgatatcaagaacgggaagcagtttgtctacccaagattactgttcattattacaggtaaaggacctgataggaagaaatatgaggatcaaataaaaaggttgaagttgagacgtgttgccttgcggacaatgtggcttgcatcagaggactaccctttattgctcgggtcagctgatctaggagtgtcgttgcatacatcttcgtcagggctggacctaccaatgaaggtggttgatatgtttggatgcggattgcctgtttgtgctgcttcattctcctgcattgaggagcttgtaaaagtaaacaaaaatggtcttcttttctcaacatcttcggagcttgctgatgaacttatgatgctctttaaggggtttccagaagaatgcaatgccttgaaatccctcaaagaaggtgccatgaagtcagcatcatcttcgaaatggtcaacagaatgggaaaccaatgcactacctttggtggaccaggtcattggatgagatgtgtgcttacatacatcagatagaattgttgtattgcagagaaccagagatcggtgtactagagagaccagatgtacattaaagggtacggtttgctttcaccaaaaatcaattgctagttgctgccagtgccatgtgcaccacttcagcaaaacttgggcaagtttgtagctacgaagctctttcctttttagactgggaaacatactctgctgaacacatgtctaagttgtttcaggatgtatactactgtaggccagcactttgtttgataatatggtctgtattggaatacctctaatctgttacgtcagaaggaaaacatagaaaaccatattgttttccctggcttcgaaggccatctgataagatcctatgcagagaggcgtgtaccaaacagaagtgtacaaggaatcaggatctctagcacgatgtctggagaatgaaaaggatatgtcagatgcatggtcctatcttatgtttacacactgctacaaatacactctgaatcagttctgatccatttgacctcttcgtcctcggcctctacctttcctttcggggccatctggactgcttggtcatcccctgttgcagtatcagggaacgctgggcttcagggtgtgccttcttgagcagcaaacctcagacaacctgtcaaacaggaaagccatgcgtgagtaactctgaaattctgaacaggttcggttctgaaatctgaatgcgacctgaactctatagcacctcgtcgaatcccatttcgggtacgggtacagtttccctcaagcttggcctgggccgaggacctccgaaggctcttgttgcgagtaccctgaacgaccttggcctaccaatgcctccattcctggaggtggaagaacagctcagaagccgctacgagctgcag

SEQ ID NO: 5101 - DNA, 1887 bp, Zea mays
gcacgagaccattacctagaacatcctaatcgaaaactactgtagccgctgctgctcctctcctcccatctcaccacacaccgcagccccagcaagatcgcgcggaggccatggcgaagcccaagccttcctccgccggcgccaagccgaccgcggctgcgccaccggttacagtgcactcggcgctggtcacctacacctccatgctcgcgctcctctccctctgcccgcccttcgtcatcctcctgtggtacacgatggtgcacgcggacggatcggtggtgcggacttacgagcacctcagggatcacggcgtgctcgaggggctaaaggccatctggcccatgcccaccctcgtcgcgtggaagatcatcttcggcttcgggctcttcgaggccgtcctacagctgctgctccctgggaagcgcttcgaagggcccatctcgcctgccgggaacgtgccggtctacaaggcaaatggcttacaagcatatgcagtgaccttgataacttaccttggtttgtggtggttcggtatatttaaccctgcaatagtgtatgatcacttgggggagatatactctgctcttgtttttggaagctttgtattctgtatttttctctacataaagggccatgtatttccatcttcatctgactctggatcctctgggaatgtgataattgacttctactggggtatggagctgtaccctcggattggcaagtactttgatatcaaagtcttcaccaactgtcgtttcggtatgatgtcctgggctgttcttgccgtaacctattgcataaagcagtatgaaatgaatggcagagttgctgattctatgcttgtgaatactgcacttatgttgatctatatcactaagttcttttggtgggaatctggatattggtgtactatggacattgctcatgatagagctggtttctatatctgctggggatgcttggtatgggttccatccatatatacttcccctggaatgtaccttgtaaaccaccctttgaatttgggcccccagctagcactctcaattcttctagctggaatgttgtgcatatacataaactatgattgtgaccgtcagcgccaagaatttcgacggacgaatgggaaatgctcggtctggggcaaggctccatctaagattgttgcctcttatcagactacaaagggagaaactaaaaccagtcttctcttgacttctggatggtggggcttgtcacgtcacttccactatgtcccagagatactatctgcatttttctggactgttccagctcttttcaatcacttcctaccatacttctacgtgatctttctgactatattattgtttgaccgagcaaagagggatgatgaccggtgctcatcaaagtacgggaagtactggaagatttactgcaacaaagtaccatacagagtcattcctggcatttactgagcatctcgagttctggacgactcttgatattaagctcaacagatgccacgatatccagtcttcataccgatttgctactgattgtgtaatgtcgatggtaggcttgggctgtacgcagtattaggtgtaggcaacttggcttttggcatttaccttgtatgtgtcgtgtatctagggctggggcttgctccttcagttgttagacagtagggggtaatctcaggggtgcaatgtactccctccgtcctaaaataaaagcatatctagtatttaaattttgttccaaataaaaatgcacaatgaactatcatatcgtgtaacgatgtctttgattgtgggacaaactagctggagatgggatggtggatttgaaggatatgaaaggatcatgatgctgaagaggaagggtgaattgagcccccct

SEQ ID NO: 5102 - DNA, 1632 bp, Zea mays
caggcacccgacggacggatgggctggggcggctataaacatcggggcgtccctcccggccggcgggatcaccaaacgccggtggagtcactcgagcccgcccgggtctcttcctcttccattgattccattcaagatcactactgttaccagccagccagtcgttcgttaagaagagagcgagcgagcaagagagagagagagagggagaagggggaagatcagaacgaagagagggagatgagggggcaaacgcagacagcttccgcggggggccggtggcgaggcgacggcgctgcggcgtggtgttggtggtgggtggccgtggtcctcctgcttggccatttaccgagctgcgcgcgcgcggggctgctggagtccaacccgggcctggcctacaacttctacaagaacagctgccccagcgtggactccatcgtccgcagcgtcacctgggcgcaggtcgccgccaaccctgccctcccggctcgcctcctccgcctccacttccatgactgcttcgtcaagggctgcgacgcgtcgatcctgctggacaccgcgcagagcgagaagacggcggcgccgaacctgtcggtgggcgggtacgaggtgatcgacgcgatcaaggcgcagctggagagggcgtgcccgggcgtggtgtcgtgcgccgacatcgtggcgctggcggcgcgcgacgccgtgtcgtaccagttcaaggcgtcgctgtggcaggtggagacggggcggcgcgacggcacggtgtcgctggcgtccaacacgggggcgctgccgtcgcccttcgcgggcttcgcgggcctgctgcagagcttctcggaccgggggctgaacctgacggacctcgtggcgctgtcgggggcgcacaccatcggcgtggcaagctgctccagcgtcaccccgcgcctgtaccaggggaacgccagcagcgtggacccgctgctggactcggcctacgcgcggacgctcatgtcgtcgtgccccaacccgtcgccggcgtcggccaccgtggcgctggacggaggcacgccgttccggttcgacagcagttactactccagggtgcagcagaagcagggcacgctggcctccgacgccgcgctggcgcagaacgccgccgccgcgcagatggtggccgatctcaccaaccccatcaagttctacgccgccttctccatgtccatgaagaagatgggccgcgtcgacgtgctcaccggcgccaacggccagatcaggaagcagtgccgccaggtcaacacctcctgatcaacaaggcgtcacagggaggggccatggtttttccctcttcgttcttctctttttctgcaccgcctggtattattgttccatgcatccggtttcggctcggcttcggctcggcgcgcatcaaatatatttcgcccccgcgccgtgattgagggccctcctccgacgaaagaaatccattgctttctttgttatttatattagtttactcactgtcctgtgttccattgtcttgccttgcaaaaatgtaagaaagattaaagatgtaagcaaaaaaaaaaacaatgcggatcatccactctaaaaaaaaaaaaaaaaaaaccgtccttttttaaaaaaaaaaaaaaaaaa

SEQ ID NO: 5103 - DNA, 1770 bp, Zea mays
gcgtgcccagtgtctgacaacgcgccccaaccccaaccccaacccagcggtcccagtcccccctccgttctctctgcactctgcagctgccggtgccggccatggcgcgcgccccgagctcgtggacgccgtccctcgccatggtgctcctcgtcgtggccgccgcggccgtggtcgcgtcgtcggaggcggccagggtgcccgccgccgtcggcaactggacgggggaggagctgcgcggggccgcggcgaggcggggcggccggcgctcccggcgccgcgcgttcgagaacggcctcggccggacgccgcagatggggtggaatagctggaaccacttcggctgcgggatcaacgagaacctcatcaagcagacagctgatgcgctggtcaacaccggtctggcgaagctgggctacgagtatgtcaacatagatgattgctgggcggagtctgacagggactaccagggaagcttcgttgcaaacagacaaaccttcccctctggcatcaaggcgctcgcggactacgtgcacgccaaggggctcaagcttggcatctacagcgatgctgggacacggacgtgcagccagaaaatgccagggtcacttgaccacgaggagcaggacgtgaagacattctcgtcctggggtatcgattatctgaaatacgacaactgcaacgacgccggcaggagcgtcatggagaggtatacgaagatgagcaacgctatgaagacgtatgggaagggcatcttcttctcgctgtgcgaatgggggaggcaaaaccctgctacctgggcaggcggcatggggaacagctggagaacgaccgatgatatcgccgacaactggggcagcatgacgtctcgtgcagaccagaacgacaggtgggcttcctacgccggacctggcgggtggaacgatcctgacatgcttgaggtgggcaacggcggcatgtccgaggcggagtaccgctctcacttcagcatctgggcactcgccaaggctccgcttctgatcgggtgcgacgtgcgggcgatgagccagcagacgatgggcatactcagcaactcggaagtcatcgccgtgaaccaagatagccaaggtgcgcagggaaagaaagtgcagtccagcaatggcttggaggtttgggctgggccgctcagcaacaacaggaaggccgtggttctctggaaccggcagggataccaggcaaccatcaccgcacagtggtcgagcatcgggctcgcttcttccactgctgtcactgctcgcgatctatgggcgcactcgtcgttctcggctcaaggccagctatcagcttcggtgccacctcacgactgcaagatgtatgtcttgacgccgaactagctcagaagacaagagcggattgttccatggcgcgtgggatgcaaccattcggtcaggattcagggaagaagagtatgcagtgcaggcaaggatttcaagagaaggaaattcgatatcatttggttatacaggatatgagtgcgaatggaggaataatttatactaatactatggaagtgtatctaaggcgccgtcaaaatgccggtgcctgtgttactggatgtttgtaacgagagttgcagcaataaaattggcttgcccaccaccaaaaataaaaacatgtggacggatttcagagaacaagagaatatagaaaatgtgcgttctctgtgaagtgatgttactaatgttatatcccatgaattcttaataaggtcatcggcactcatgctactct

SEQ ID NO: 5104 - DNA, 1522 bp, Zea mays
cgaaacgtttcacgtgagcaaacctgggcgtattcctctctctttcctcatcctcatccgagtggctctctccttgtgctgtggcggcggcggcgcccggctctgctcggacggactccaccgaaggcgctcggctcccctcgggctccaccccccgcggccggccctctgactgcaccgacggtgcccgccccccctcggcatccaccagcggtgcccggctccaagtccccgccgccactccgaccgtcctctagcagctccgtccggtggtccggccagctgcctagctccctccgaccgtccggccagcaccgcctcctgctcgcggcctcgcccagctcctccgccctccgctgagacgcagatcttggtgcggcagggcaccacagaggctgtgcgtgtgctggtggcctggtgcttgcaaccgagagccagtgtccagcctgccagctcagcccggcgccaaccgcccagcggctggctcgggcagcggccagtggccaacagctgacaaccatacctcgtttcttcggcgtcctccgccgctgcccccaactatgcatcctgttccagtctcctcccagccctttaccgcaactcctgcaaaaaaacttgtttcaaggagcactgctgtgaggaaggccatccattttgtcaacctgcggacagctggaaggtctagtggaaacctggctatgaactccgtaccgaaaccagcacttgggtccgaaacatcttggagggaggattttgctgtgggggataaggatgctgtggtcattgttgatcatgggtcaagacgccaagaatccaatctcatgctaaatgactttgttgagatgttccgggcgaagactagctatagtattgttgaggctgctcatatggagctagcggagcctactataaaggatgcttttggaaaatgtgtgcaacaaggagcatcacgagttattgtcagtccatatttcctttcccctggacgacactggaagcaagacattcctgctttagcagcagaggcatcaaaggagcactcaaatataccctatattgtcactgcccctcttgggctgcatgagcttatggtggatatcatgaatgatcgcatcaagtactgcctgcgacatgttgcgggtgatgtcgatgagtgtacagtgtgtgctggaaccggaaagtgccgcctgtactcctgatggagcatacctgggaggcacatcgatactgttaccatttattatgagatctggagaatacgagatctgaccatattctgagcagatcgtcagaattagacaagtgccaaattagttatgctgtgcatgcttgcgaacatcaatagtgatagagattcattagctaatcttgagtttatttacataacgaacaaactcagtcaagtgctctgatatttccattcacatgtaatctatattcctgctaccttgtagttgaatgaattaacatggatcaaatgataatataatgtgcgcttgtttgatttgccagttttttgttt

SEQ ID NO: 5105 - DNA, 2223 bp, Zea mays
  misc_feature (17)..(17): n is a, c, g, or t
  misc_feature (20)..(20): n is a, c, g, or t
ggcacgagcgcctcttngcnccgggagcccgtgctcgggggcccccggccggcgcggcgtggccagcgctgatttcgagggggtcgggctgtgtttcttcggcgccgcagcaggcgcggagggtggtcccatggtgttggaggactcgaccgcgtctgcagccacggtcgaggcggaggccagggtcgcggctggtgggaggagtgtcttcgccgtggactgcgtgccgctgtggggctacacttccatatgcggccgccgtccggagatggaggatgccgttgctatagtgccgcgattctttgacttgccactctggttgctcaccggcaatgcgatggtcgatggcctcgatcccatgacgttccgcttacctgcacatttctttggtgtctatgacggacacggtggtgcacaggtagcaaattactgtcgggaacgcctccatgtggccctactggagcagctgagcaggatagaggagactgcgtgtgcagctaacttgggagacatggagttcaagaaacagtgggaaaaggtctttgtggattcttatgctagagtggatgacgaggttgggggaaacacgatgaggggaggtggtgaagaagcaggcacaagtgatgctgctatgacactcgtgccagaacctgtggcacctgagacggtgggttcgacggcggtcgtcgctgtcatctgctcctcacatatcattgtctccaactgtggagattcacgggcagtgctctgccgaggcaagcagcctgtgcctctgtcggtggatcataaacctaacagggaggatgagtatgcaaggattgaggcagagggtggcaaggtcatacaatggaacggttatcgagttttcggtgttcttgcaatgtcgcgatcaattggtgacagatatctgaagccatggataattccagtcccagaggtaacaatagttccgcgggctaaggatgacgagtgccttattcttgccagtgacggcctctgggatgtaatgtcaaatgaagaggtatgtgaaatcgctcgcaagcggatacttctgtggcacaaaaagaacagcacaagctcatcatcagccccacgggttggtgactccgcagactcagccgctcaagcggctgctgaatgcttgtcaaagcttgctcttcagaaggggagcaaagacaacattactgtcgtggtagttgatctgaaagcacagcgcaagttcaagagcaaaacttaaccgtgacaagcgtagcaacaagttgctaagaacctatagattcggacagtcccaagttcggtcattttagttcgctgctttagtgcattgcttagcccagttccttatttttctcagttctttttaagccatgccaagggctgtattccccgtatacggtacagatcgcgaaatccctatcagggatggtttggtgatatcagggtttatatgttttcctgaccgtggtgactgtcctgttttcattcttctttcttcgctgccctgtattcattttgtcaagctggggcaggcatccaagtatttggcaatgtatatttgagcttgcaggatacaaaggaaacgaattgttatgaagggtacgtatcctgcctgcctgaatttgggaatctatcaactgcatcagctggtaatataagtatggactcgcaatctggatactggtggagagaacctaatggtccagaagggctgagttgtgctaaaaaagtttgaggcaacaaccgtagtgtacataagtttctactcaacttctgcatggtaaagttttatgacaaaaaggatcatattaatgttgaaaaaatccttacggttaatgaagctaaagatgtcccctgaaaataagcaagatgaaactatgtaaagaaatatgctaagcaagtctacttagagttttacacaataattaacagtttagcacaaacaagggaacaactagataagcaacaagaataattaacagttcagagcacagacatcctagaaccatagtttgggaaccttattttctgaaggatcatagtttggaaatcccttggaaaattgaatttcccaaactagccctcattaagagagataaggagcattcctaatggactgctgtgtaattgactggatgttagactgccactttactcatcatggagctcttttgaatgtgtgtgtatatatatatatatatatatatatatatatatatatatata

SEQ ID NO: 5106 - DNA, 4042 bp, Zea mays
  misc_feature (4011)..(4011): n is a, c, g, or t
  misc_feature (4042)..(4042): n is a, c, g, or t
cttccccttctttcaccggcctcgagtcacacgcgtgagatctgtgccttccgccgcggccacatgccacacaacgacgcccggcgagcttcaccgcgatagaggtaggcccgcccgataccaaggaggatggcggcagtgggcgttggtgcagcggacgagcggtgggcttcgttgtgcaactgcgtggtgaacttcttgctggaggagcggtatcacctcacggcgctagagctattgcaggagctccaggaggacggccgctccgcgcacgccctccgcctccgcgctttcttctccgacccagcgcttttcccgcccgatctcgtcgcccgctcatcctctgcgccgcccggtgctgatccacagattttgctagaagagaaaatagcagcagaagaaaagttggcactcacggagtatgatctgcgcctagccaaagaagacctttcacagttgaagcttgaattacaaaaacaaaaagaatcatctcctgatgattcaaatgggctccttttgggtgcttctatacgcgaaggatatactaggcaacaagaaaattgggatgtgaaaatttcagcattaggccctctaaaggataatgaacgaaaagatcttaattgcgctgtaaaagaatacttgcttttggcagggtatcgacttgctgttatgacattcattgaggaggttcctgatcaagaccttgatgtttggccaaacagttcagcttgtgttcctgatgcccttcgcccgtcgttctatcagtatctttcttctactgcagaggctgcagacgaaaaaatatccatacttcaggaaaatgaaacattactcaaggacaatgaacgactcaatgctgaaaatgattccttgatgaagagcagggaaggagctaatagtcaggttgccgctttaaggaagtctttggaagctgcacacaaggatataaaagacaaggaaaaaatgattcaagacttgaggcagtcactggatgtccagaggaaggagctgaatgactgcagagctgaaatcacagccctgaagatgtacatcgaagggactcaatcaatcaaacaattgtttgttggaactagtgatggtgtaaagtcgcattcctttgctaattctgtgggagcatcatcattgaataatgaagatgaagattcaaaaggatctgaagccataacaaataagctagcatcagcagtaaatattactgatgatacgcagaaagatcgccaagttctagaaagtagcgctgaaggttcctcagtttcagaaactccagtgtctttcacagctgttgagaatgacagctatggtacatcaaaagaagataaatctgtgtcaaatatctcatcgaataatgtatgttttcagagtaatctgcatggagcttccatgactggtaaaagccaggggagttcagatggcatatccatgtatttatctattgagaaactagagagcccaagtaaacaaaaatcttcagataagattgctttggagactataaagatagtttcagatgcacttccaaagattgttccttatgtgctcataaaccatcgtgaggaacttcttccattgatcatatgtgctatagaaaagcatccagatagcgatgtacgggattccttgactcatacattgtttaacctgataaaacggcctgatggagaacagagacgcatcataatggatgcttgtgtagaattagcaaagagcgttggtgagatgaggacagaaactgagttacttccacaatgttgggagcagataaaccaccaatatgaggagcgcagattgcttgttgctcagtcgtgcggtgaacttgccgtttatgtccgtccagagatacgagattccctcattttatccattgtgcaacaacttgtcgaagatgctgcaacagttgtaagggaagctgcaacacataacctggcattgcttcttcctatgtttccaaatctggacaaatattataaggttgaggagctaatgttccaattggtctgtgacccgtctggggcggttgtggaagttgcactcaaggaacttgttcctgctgtagtaagatggggagataaattggatcagatatcaagagtactattggctcatatcctggcatctgctcagcgatgtccacctatttcaggtgttgaaggtacaatagactctcatcttcgtgttttaggagaacaagagcgctggaatattggtgtccttcttcggatgttgactgagttgcttccatttattcatcagaaagctatacaaacttgcccctttgcatcagctgatccaacaagctctacaccagagaacttctcagcatcctgcctaaaatcatatgcaacaggtgactctgagtggtcagcatttgagtggatgcacactgattgcctgccagatttgatcaagcttgcctgcttgttgcctgtgaaagaagataacttaagaaccatcatcacaaagtacctcttggaagtatctggactctacggtaaagattatctggagcacattatgctacctgtatttcttgtagctgctggtgacattgatagtggcgattttacctattttcctctatcaatccagccaaaagtccgtggcttgcgtccgaaaacttcaactgctgaaaaacttgccatcatgtgtgtcttcccattattgttatctggtattttgggttctccttccagtcgtcaacagttggaagagtatctgagaaaagtacttatccaaaacaccaaggatggttcattttctatgcatcatactactgagatcattaacgcagttcggtttctttgcttatttgtggagcaccatagtgtcatctttaacattttgtgggagatggttgcgagctcggataccagcctgaaaataaatgctgcggctctactgagagcacttgtaccctacacggatgtgaaaatagcatcaactcatattttgccagcacttgttacccttggctctgatcaaaacttgaaagtaaaatatgccagtatagatgcatttggagctgttgctcagcatttcaaaaatgacatggttgttgacaaaatacgcattcaaatggatgcttttcttgaagatggatcacatgaagcttctgtttctgttattcgtgcacttgcagtagctgtacctcattcaacagataggctacgtgaatatcttttaaccaagatatttaagatgacatgcatcacacctgtcggcaatgatattgaacggcgtcgtgaaagagcaaatgtactctgtgaagcgctccgggctctggatgctacagatcttcctgctatgggtatacgtgatttgcttctgccatcaatacaaaatctgttaaaagatctggatgctctagaccctgcgcacaaggaggctttagaaatcataagccgggaaaggtcagggggtacgctggaaagcattagcaaggtaatgggggcgcatcttgggattgcatcatctgtcagcagtttctttggtgagaacagtctcctcacaaagaaagaaggtggcgaggaacatgatcctgctggccccaccgctcctgagcaaaacctgcaggctcagccagagagcacgaggtttggtcgcataatgaggagcggatttggagacatattgcgaggtcaaagcaaaggacagtgatgcacttagattgaaatgatcaattacatacatagctgccgataccacattctttctttgtaagttgacagaatatacctcaagggttgtatgttatttgccgaggtaaaaaaaaaacgatttgacgttgccaatctagcatcaaacttcctgtatgtaagttgcctgtagttagctgcccatttataagatgctaataattgtgtctttgtttcatttgtttttataaataaaatatataactagatatgagacaaaaaaaaaaaaaaaactgaaatttggatgttatagttggctgacatcatgtaattgatctgcattggttgaaggaacggngggttctgaactcaaaaaaaaaaaaaaaaan

SEQ ID NO: 5107 - DNA, 3008 bp, Zea mays
gcacgccgtaaaaggccaaaaacctaaacatacgcgcctaactccgcgtcctcccccccctccctcgaagcggccaaggcggcggcagcagtgccggcatgggcgcaatgtcggcttcgatttcgtcggtgaattggctagtcgaggatgacatcctcctcaagaacgccgtcgaggctggtgcttcgttagagtccttagccagaggagctgtatgtttttcccgtaaattcactcttcatgaaatacaggaccgctggaattcattgctatatgacccagatatctcaacacaagcagcttctcggatggctgagtatgagaatgaactttctacttccgatccagccaaggcacataaacttttcaactcaaaagcaaaggatttttcatttcagaaacggaaaatagacagtgtaaagaatctatattatgcgatgagaaaaagagtacgcaatgatccacgcaacagtggcgaccttggatttcttgtcccctgttcgtgtacggcaattggtagtgagtgtatctgtggaggcctacctaacaatattgaaccagagctgaattcagtaagccgctatgggcaagtaggttcaaggtacaccattggacattcatattctgaaatgaacgaacatgcttttcatacgaagcatactgaaagcatgacaagagatggggatggcaccagtaatgttgtgtatggctactcagatgtaggccaactatatgaacatcatgcgtacacagcgaataatcatgggaatagagaagggaacaatctttctctaaagagtatcacaaattttcaggattctatgcagtttcagcagttggacaacaatcaatgtggtaatggggtggtagactcaaaggctttggtgatctctaaccatttcagtggaagtgtgcaggaacctatgcctctccaaatgattggtcaacctgagggttctgaagcaccaggtggtgcaatcttgagtggggttcagcgaagcgacaggctcgctcttgctgatgataaggatgtaaaatcagaagacagggaccctctcacatttgaagcgcatttagatggtgggatatctggtttagatcacgctactgagtttatggacttcccatatttcactaatagtgaagaccttgatatcctgaatagtgaaaatcttttgaattctccaagtgagggaatccaggaggatttagacgatactgcattagttgttcatggggttagatcaaccatgcaaaatctggttcatgctgatgaagccaatatgtcctgtgatcaaatagatcttggtgatgtgaaaaataatgtagatgcttctggtataatcttatttcctacttcattagtagtgccctgtcctggcctgtatgttgagtgcaaattgaacacagaagatactgaaattccttgcaacgacgatgtttctacaccaacagagtatcctcttgaatgctgtacttctacctttgggcagaaatctgagaatactatctattccgtctcccctgcaatcagccctccatcaattgctgaacagcccaacccatccacttcagaacaaaaagaagattcagtggctcatgacgaaggtggtgtcctaggagctaaaccatcagaaggtgctttaacagttggaggccttttgcctggtaacattgacacaaatgatgcaaacacatgcatgctagctttgccttcttttagcactgctggatttggtgaaggatcaccttgtagtttaggaccacacgagagctttgataactctcatggtttgactttgcaaaattcagttcaagctcctgatcagatgcaacacaactcacttgatggtaaaccagaattaggtgacaaggctgctctacagaactgtatgccatcaaatgcactgcccgatttggatattcagaacactattgcaaatgcgccaacaccagctcaagcagaagaatgccctgactatgaaaaagatgttccaaattactatgatctagaagctttgattcttgaccaggatcttatcccgtgggaccaagactccgattttatgcatcctgaagttaccggatttcctcacccggaaagcaggaaggcattgattagattggagcaaggtgctcggtcttgtatgaacagagctatcatgtcgcatggtgcctttgcagttatctatggattgcacttgagatgctacataaaggatcctgaggttactcttggaagagagacagaagacattaaagttgacattgatttaggaaaagaagggagggcaaataagatatctcgccgacaggcggttatcaagatggatgaatctgggtattttcatattaagaacactggaaaatgtccaatctttgttaatagcaaggaaataccaagctgcaaacgcatcaacctaagctcagactcattaatcgagataaaggacatgaggtttattttccacgtaaaccaagaggctgtgaggcagtacattgatcgtgacctgaagccagaacgctaatttcccctggctttccagtcagcagcagcctgtgagtgactgcctcattaacagcaatagaagtagcatagcagtaaatttgagtaagcattgctcgtttaggatgttccttcatatgatgttaacaagttaggttcacttggctccggtctgtaaatggttgtagtttgttgcgttttctgtctgtttggcgggcataaatcatgcatataaccagcgcatttgcttccagtttgtacctacactcccaggaatgatttcatttgtaatactggcaccctagattgtggtgactgccgccaagagcaagaggcatccaatgcaataaagtgcggaaaagaatcaatagaagggtagattctagggtagaacaggaggagggtgcacttgtgcaagaaaccattcggttcttgcgacgctataagcataaactttattggtttttatttatataccctgatgatcttgaagcaaagggac

SEQ ID NO: 5108 - DNA, 1900 bp, Zea mays
acaccatacaaccgacgactgcatttaatgatcattctcggttcatttgctatttttctcgtacaattatgctgtatatatataacaaaaaaatgttctcagtttacctgcctactaagaggaccttcctcagcaggtcatcgataaaaaaccaccgctcacgctcacattcaacaatgctgcattacagttgtcattgcatttcatctgctatactttttttgtatattaagtaaagcaaacaaatggccttattggacctattggtgcagtacccttccacaatatgaagagaacattcaggtggaatggaagcaaatttatacggctgcccctttcacttgtcggccaggaaatgttcagctattatctggtggcctagaagaccagcaattgatacatagagccacacttagtgaagtctataaatacgagtattacttctgttttgatattcaagcacaattgttgtcagacttgtttccgtcgccctcaggtcaacagtgctctgaaaaggtaatcccagcatctacaggaccatggagatcttcaaactttatttgatatcaatacagctgctggtccctaaagatccatcctaccaaggaagtctgataacctgatactttttgcaattactgtacttccatcatcagcatcaagatgccgcagtattacctcttccaagcggccatctctgtaggcatgcttatagaaacaacttgttccgaaggggcatgagccagtcccaaagtcgaagtacttgcaatcaatagacttgagcttggatttgtagctttcagtgatctcctctttctcttcctttgagaagtaccaaagaacacttggaatgacatagtatgaaagtttccgacatattggacaagccctcaatgctgagttcacatccataccagatgcaggagaattgctacgccaatttctaatgcattcaatacagaaaggatgatcacattcggataagagtccaaacttcctttcagcagcagtaggctttgaaagcacacgatccaaacatacactacattctatttcttggctgcgtttcagagctacaaggcgtttgtgatttttctcacataacttgatatgctcctccctctcatcaggacgataaggatgcaagcacagttttccacaggttgcacacagatctccatgcatttgagggcacccttccccataaggacaattaccagcagcagcaaaagaacaaatagggagatccacaggtttcaatgatgtctggtttatcaaattttgattagaagaccagtcaattccatcatctgaaacaatatcatgctgaaaatcatttctccatgcaggcttactggcagaatgtgccaacacatccacagatatctgatgtctttggttgcttgaatctgtttggtgcaccatatgaggtggatgattgtaacttgaaagttgaagagaagtagatgcacgtcttgattttgattaggatgttctaggtaatggtactcgtgcggttccgagaaactttgacatggccatatctgcaacggctaccatacgagcatgcacctttttggtagaatgtgcaaacattatttgcttgatcactccagtcgtgggagaattcacagtactctcctttcaagcaagctccatgcatgaagaacttgcaaagaactttcttagtcgacatggccgaggcaaaccgatcggacaagccagcccgcgtcgcgcagctactagaggcgactaacagcgccgtcacctagcttcgcccctgatttgaatccttcccagcacgtcgccacggcctagggattgcttgaaactggtgtgccttcctcaggttcctttctctcctcggcccttgcgcgtcgccttttgaggctttccgatt

SEQ ID NO: 5109 - DNA, 2921 bp, Zea mays
  misc_feature (908)..(908): n is a, c, g, or t
  misc_feature (966)..(966): n is a, c, g, or t
  misc_feature (1124)..(1124): n is a, c, g, or t
  misc_feature (2914)..(2914): n is a, c, g, or t
cgtgcaatcaaaccatccagagcatccaatctagatccaacggtttcatatgtaaggggttaaaagtaaactaggttctatgtttcaggtggaaagggttaaatttaaaataacagtcatcattggatctagattagatgcaccaaatcgcttgattgcacgtttgtaccaatataagtgactgcataagatattttcccgttcaaactgtctcaaccgatattggacaagcttttcttcaattggttctacctttagtctatggcgtatattttcattcgttcattccggactcgatcccttcttgtatggccacaaatccaatgtaacacacatattttcgcaacacttatctgttgaacatgtcgtctttttgtagaccaatattctgcaccatacaacatagcaggtcccatcgtcatactataaaactctccttttagcttctgtggtatcctcttatcatatagaacgccagatgcttgacgcaacttcatctaccctactttaattttatggctaacattttcatcaatcttcgtctctatgtagcattgatcctaaaaacctagatgtgtccttcttaggcactactagcagcttactagcggttgaacaccaactggttcatagttgttccttctgagatttcatataacagggagggcaggatcaccccctttggccccaactaaccatactgacataatcctgtagtgtgttccttccaagaaaagttcaaactattgaatgcaattatgcaaagctatgcccatacaatcaatttacaccctgtttggacacatagttacaaagttacctgtgagagatttttacgtggtggtaacgagaatgaccccgcctatccgggtcatggacgaagttcccatgtggctaccactgtaccnattccttgtgactatggtttggaacacgagtgttacaatacaatttttcttcatgaantaggagcccccccccccccctaaaaaaagagtaattggggactttatgatttgtcatatgcaacccaacgatcagtttttgtgaagttcatagaattttaaaattcctctagatgttcaaatataaggaatgcgttaagccttattaaccaacaatancaacaagaagaactttatctaacattgttacttgttaagcctgaatgttttggtactgatgcacttaacagtactactgtattgcactttcatctacacaggaagaactttatccggcattgttactcttccctgcggagaacaaaagtgcaatagcatatgaagggggaatgtcagtgtctcacttaatcgaatttttggagtctcatgtgagcaattctcgctatctattggaatataaaggttagtggataaacatcttgtgactgcattggttctacttaaaatatttgaatttgcttatagttctgtaatgtgtgttagcttacactttacaacactattgtttcttagaagttgtgttaatcttctcatacatgaaagtactaagtatcaaccttgctcatgtgctgtttacctgtttggcataccagcctagtttaccattcttatctagactggcagctgcttggctgtggattacgttgttctagacgttcctagacgttccccaaacctgaagtgccaccacactaaggatatgtgctgtttggttcggcacatgtggttcggcctaatatataatctgtaacaaggatcgggtacgggttgtgcaatgctgataccacattaccgcccacctcccagctttgtctgattatgcccgcggactcccttctcctgttctcttctcacaactttgtcctctccactcaacttgcggatctcacattctcgcccctatgttccgtgtgttgccagcctgtttgttcccagccaacctgttacctttgttgctagccaaacacaattaaggaaatgcaagatgttaaaaattcgaaccaaacgaattgtattttgccttacactgtgacagattgcactgcaacctgattacattagcagtacgactcccaggaccgaaccaaacagcattagttaaaatgtcacatgcatgttctgaagcttattttcttcttggtactcaggatttatgtggaagaagagaatgacaccacagcacgatgcaccacaggcaattcagtttaaagtcagtgataaaggtagcggcaatgttggttctgagttaccaagtcatccaggtgtcgttacaggatccatccttactgccactaagaagctcgggaccgcagttccatttgataatgccaaggtgctcattgtgtcagctgattctcatgaaggatttcatggcttgatcatcaacaagcgattaagctggggtgtcttcaaggatctggatagctcgatggagcctattaagcatgcaccacttttctatggtgggcctgttgtggtgcagggttatcatcttgtaagcttgtcaagagtatcctcggaggggtacatgcaagtcataccaggcgtctattatggcaacatagttgccacaagccgggtagtcacacggatcaagttgggcgagcaatctgtcaatggcctgtggttcttcctaggctactcggggtggggatacaaccaactttttgatgagctaactgaaggagcatggcttgtgagtgtgaagccgattgagcatttggactggccgaaaagttgaaagggttctgtggacctcacgcctcagctgtttctttaggaaaattcagttcatcttgcacatatctgccactctgcccacactgcaccgtgacattgtactgagcttttttttggaacatagcagcactgtgttttcataccattcaccccgtactatggtcacatattttttatacatagtacttttcttatagtggaaaaaaaantgagttg

SEQ ID NO: 5110 - DNA, 2684 bp, Zea mays
aaaaacatataagtctatgatctgtaattattcaaaatttataaaatagtactaaccataaatagagactacaccaaaaaaaaatactatagaaataaaaaaatgtgtgcgcaacgccacacaaaaattccagtaatactttattcgttcgtaaagagtcaaagcatctaaaatttaaacaaatttataaaataaaaataatatttataatataaaccaatattattaaattctttaatacttttatagtatatttgaatttataattttatctatattttttaaaagttttacaatgtgaaagggaggtagtagtattatataaaaaatttcgcacgggctgacgtggactgaattccggaaaggacgtctcctccacgcctgctccctctctctagagctgactttaggacattggaggctttgacgccttcggtgtccttgcgtccgcgtcgtgtccgcgcgcctgctgcccgccaacccgcctctcccaaatcccatccaaattcctccgcgtctttcgaagatcatattttgggaggggcaccgcccccagatcggggaggaatccccattccgtctggtgggtcggtctcccctgtccgtttttggctcttttcccctctcacaagggcggctcttggatgggctgcctgccgtgcttcgggtcggctggtgagggggcggccaaggagggcggtgcgcgcaaggacggtacgtcggatcttcgcgtcacccgggtcgaatcagataaatcaaaaccacagggtggactagactctaagaaggatgcagtcattttgagggaggggaataatcaacatattgcagcacacactttcacttttcgtgaacttgcagctgccactaagaacttcagacaagattgcttattgggtgagggaggttttggtcgtgtttataaaggacgtttggagaatggacaggttgttgcagtgaagcaacttgatcgcaatggccttcaaggaaacagggagtttctggttgaggttctaatgcttagtctgttgcaccatgacaatctagtaaacttaattggatactgcgctgatggagaccaacgtcttcttgtatacgagtttatgccattgggatcacttgaggatcatttgcatgatattccacctgataaggaacctctggactggaatacacgtatgaagattgctgctggtgccgccaagggcttagagtacttgcatgataaggcaagtcctcctgttatttacagggatttcaagtcctcaaacattctactcggtgaagggtttcatccgaagctatcagacttcggccttgccaaacttggccctgttggtgacaagactcacgtttcaacacgtgtcatgggaacttatggctactgtgctccagagtatgcaatgacagggcagcttacagctaaatctgatgtatatagttttggtgttgtgttccttgaactgattactggccgcaaagcaattgacaacacaaaaccccatggagagcaaaacctagttgcatgggctcgtcctctattcaaggaccgcagaaaattccctaaaatggctgatccgtcacttcagggctgtttccccatgaggggactgtatcaagctctagctgttgctgcaatgtgtttgcaagagcaggctgctacccgcccctttataggtgacgtggtcaccgctctttcatacctagcttctcacacatatgatccaaatgcgcctgctcaacataatcggagtaattcatctactccgagggttagccgaggtggtgggagcaatgaccaacgccgtctccgctcatcaaaccaccactctccagatttgagaagggaagtcaccacagcatcaagatacgacgatgaggttagcagggcaaactctggtactggttctggtcgccggtctggcttggatgatgcggatatgtcaggctcacaattgggtagccctgctcacactggaaggaagaggggatctcctaggacttctgaaagccagcatgctatagcagaggccaaaacatatggggaaaattcaagaggcagaaagtgaccaaactctcagagcagcattgaccgtatgagcagaatgctgaaccagatggttcatccattcatcattcatagaaaaaaaaatgataagttccttgctagcgccagacaggaacattgcatcagtccatctaggtcccttggtctttgtgaatagagctttcctcttttccctttacgggctattgccactgcttcttaacttctccatacaaatatcattgccaccacaaccaccatcagaactcccattcctgtcatctattcctcatgaatgcaatcatcatgcttacgagccttcgtcgtcacggtgtataacaacattcggttcacaatgtggaggtaaggcaaacatctgctctggggagcacaggatctcatccagttgggcatcttctgttgctgttgcatgctgggtgtcagcagtcacaccattgtcgaggggtgtgatgttctttttcttgaatggtttgtacctggggttacagcagttcacctgtgtttgatacatctgccttgtgacatttttgtgttgagttgtcggaacacatctattatcatctctaccataaaattgttgtggcccttgcatcttatccaaaaaaaaaggccccta

SEQ ID NO: 5111 - DNA, 2668 bp, Zea mays
cggatggggatggggcggcggcggctcacgcggggtggggaggggaggcgggggaacgaacgcgggtgtgggcgggcgaacggtgtggattcacagaagcgaacggatggtacagattcaccgaaggcagaacacaaaaaggcaggctactattgcttacttaataagtagtagagatttgcgcccatcttcaatgttaaggaaaagcataacgtttgtgctgccgcgataattgctgtctgcgtttgggtcccaccgccagggggccggtcgacgtctccgtccacgggtcaggtctcctcccgctgcccgacgcaaggagccattgaccacccaagggcccctgcctaggacggccccacctgtctgtcgtgccgctgatcgcccgtcgctgatggggcccggccagcccacccacccctccgcacgtcacggcgtaacgcgcggcgcgacccatccgtcccctccgtgttctgtccgcatgcgcgcgccgcccgtaattcttttccgccgcgagtcgcggcgcccgctcgtggccggtgcgcgcgtccacaaccgccgccaccgccttcccacttccaaatacgcctgctgccactttccccattcctgtctgaccatccccacgcccccctgctgtggcctctgctctctcctgccagttcacctgctgcctccggtgcccgctgctgtgcctcgctcgctcaccaccaccaatcgccaccccgtgcggcagccgcgctgccatcccgcggaggactggaggagcacgcatatccgagccttccctgccgcgtcgcatggactcatgctgtcgcgggccgcctcccgcatcgcctccaaccgggtgcctgcctaactggccgattttcttcctcgcgtagccccattccgcagcacaaatagcgcgtcactttcccaatttctatcgcgtgccccccttccgatcctgccatttcgtgcatcctgtagcgtctggcagtgcgggggtcatcggggatggagtgggtggacaggaccaaggcctccgccgccgccgccgcagcggcggcggacgagagggctgggggagcggaagggctcgcgggatacgtcaaggtcatgaccgacgaacagatggaggtgctccgcaagcagatctccatctacgccaccatctgcgagcagcttgtcgagatgcaccgcgccctcaccgagcaccaggacaccattgcaggagagctgcgtatcattgcattaagaagaaaagccgaatacaaatggcctgcgaggctgcaaccccgggcaaaggagtccgaagaggaaacccaaagaaaatataaagaaactactaaaaaagagaaggccaggtcacaaccactaactacaacttcctaagaatttcctgatccaagagcacgcaaaccagctgctccaacaaaacaccaaagattgcgctcatccataagggaccggagatttgcataaactttttttagctttcattaggtcattttttaaatattccgtattccaatgattcaccctaattacttacattgatggccgcacaacatcccacctgtccctttttagaataatctttaaaacagacttcactgaatttgcccttcctcctgtacaagtgttttaatgctcctttgtaatgtatgcattgtcgatggaatatagtcccttcttttttttcccgatcaactgggtttttgtttcttcttcaggaattaggtttagtaatctgtactgtgatcctcaaattatccctggaggccacaagatcacagcaaggcaacgatggcaaccaacaccaatgcagctgcagatcttggagaacatctttgaccaaggcaatggaacaccaagcaagcagaggataaaggagataacggcagagctctcgcaccatggccaaatctcggagacaaatgtgtacaactggttccagaacagacgggcacggtcaaagcggaagcaggccgcttctttaccgaacaatgctgaatctgaagctgaggtggacgaggagtctctcaccgataagaagccgaagtcagatcggtcgctccaggacaacaaggctatgggcgctcacaacgctgacaggatatctgggatgcatcacttggacactgatcatgaccaaatcggtggcatgatgtatggatgcaatgacaacggcttgagatcgtctggcagttctggccagatgtccttctacgggaacatcatgccgaatccaagaatcgatcatttcccggggaaggtggagagctcccggagcttctcccatctccaacacggggaaggctttgacatgtttggatgacatgatgcggcgctgagttgccgtgtaaaatgtgatggttgacacatcgtgcgttcaatttgctgacatgaaagttgatgttggatgtccgtgttgcttatcacgttctggttaaccacctccgcggatggtagctagcttgaatgaacctactctttgggatagctgtaagaggttgatattatagtttgccagtagtctatatacgctgaactatcagcatgtaattctccacgtttgcaaatttagcacgggtatgcagcagcctgtggttaaaccttcgtgtgtgtgaaaccatttcttgcttgcttttaagaaaaaaaaaaaaaaaaaaaaaaagcggcc

SEQ ID NO: 5112 - DNA, 2007 bp, Zea mays
ttcagttagatctgaagctcttgcacaaagtctcttccactagatgggcataaaggtggattaattaggacttataggctagaactcacaccacaactaactaataggtaggctcaatatgccgctggattaggacgctgatatgataacaataataaaaatggtttatagtggtttgaccgtgtaagcatgcataatactctacatcatctttatgatggatgggtaatgggttgatgaaaatggagatgaagattgcatgcttagatatggtatactggtatgaacattggaacatgcatgaggaccgatcgactagctccacctttatttttattccgttgagagttatcgtcatctaagtttttaagaagcgtaaaatctagcaaagctcggactaagagcatggatctgaagccagcgttcggaaccttcggaccctcttctacattgctttaaataatatgacaatatcatacagctaagctagcggtactggccatgtttgtgtgactgagccggccagctccgccaatcccgttggcttggctgcaactaacgaattggctataaatatcagcagctccgggcgccggtccggaaccaaagctagctactttgttgctgtttttattcgtttgtcacataagcagtggtggtcggtcggccggcgacaatgagcggccgtgtgttcgtcctggccgctgccttcggcgtgctgctcgccgcagccgccgtgtcctcgaggcccgtcctgactccgctgggtactagccgccctgctgccggcgacctgtccgtgtacttccacgcggactcgtgcccgcagctggagacgatcgtgcggtccagcgtggacgcggcgctccagcagaacgtccgtctgacggcgggtctcctccgcctcttgttccacgactgcttcccgcagggctgcgacgcgtccatcctcctggacaacggcgagcgcggcctcccgcccaacgtggggctgcagcaggaggccgtgcagctggtggaggacatccgcgggaaggtgcacgcggcgtgcgggcccaccgtgtcgtgcgccgacatcacggtgctggccacccgcgacgccgtgagcctgtccggcgggccttccttcacggtgccgctggggcggctggacagcgcggcgccggcgtccagcaacgacgtgttcacgctgccgccgccgacggcgacggtggacgagctgctgacggcgttcgggagcaagaacctgtcggacccggcggacctggtggcgctgtcgggcgcgcacacggtggggaaggcgcggtgcagctcgttcggcgacgtggcgggcccggccaccgacgacgtgacgcggtgcgtgacggcgacgtgctcggcccccgggagcggcgacacgctgcgggacctggacttcctgacgcccgccgtgttcgacaacctctacttcgtggagctgacgctgaggaagaacaagggggtgatgctgccgtcggaccaggggctggtgagcgacccgcgcacgagctggctcgtccagggcttcgccgacaaccactggtggttcttcgaccagttcaggacctccatgatcaagatgagccagctcaggggaccccaggggaacgtcggcgagatccgccgtaactgcttccgcccaaacaccaacggcatcgccgcctctgcttgagttgactgaccaggcaccgatccattacttcactttcactgtgtgtaataattaataataataaaacaaaaacaacgccagcccgtacgtgccgtgtgaggggggcacgtggttgtggctatactgtagccgtcaccaccatgtcggcgtcgtccatgcatgtcgcattaccgatttttgttcatgttccgatctcatctcatcatctcgctatcaataacaattataatagtgtttattagtagtacatcgcatcacatggcgactctgactctcaactatgatcacctactcaccagtttcttgtcccgtccccg

SEQ ID NO: 5113 - DNA, 3428 bp, Zea mays
aattcggcacgtgcgcaatatacggtgcgtgtgggggcggcggcgacgagggttttgctgctccgtacaccgcgtgcagcggcgacgcgaccgcagctggtcgccgccccggatcgaggagggggaggagccggcggaggctcctgtggtggctgcgggggcgggagcgggagcgccatgaggggcggtggccgtggcggcggcgggagacagccttcctacgcggcgccggatggggcggatgcggcggcgatcccggtcgcctcaaggaagatggtgcagagcctcaaggggatcctggccgaccgctcggagggcgagatctacgccacgctctgcgactgcggaatggaccccgacatagccgtcgagaggctcatctcccaggatacttttcatgaagtcagaagaaagcgggataggaaaaaggagactaaagttaatcacgaaacaaggcctcgacctttccagaaatatacataccgaggatataaggctgtttcagatcgaagtgggcgagaccctacaggcggtttcaaaggccctgtaaagaaggaaccagagttgcaagctccactaaactcatcagccttggatgtcaagacaagtgacactacagaaatattttctgctactatcaatgttgcccagactgatgctaagaacaccacttctcagcctttatctaaagtgcagcatggttggggtggtattccaggtcgcccttccatggctgaaatagtgaagatgggcaggcctcaagctaaagttgggagcagatctgttgcaagtagcactgcgttgccaaccgttggtgattcagtcatttccaatacaccaaatcttgtgcccgaggaatataacagaactgtttttgcatcagaagcaggccatgtcgcagcagataaattgccaaacggtgctgttgaggtgcactctctacctaaagatgcttccgcatttgatatgttaccttcagctgagggaacagatgttgaagccccttccatgagtgctagtgcacaaggttcatcaatgccagatgccaatgaagatgacattgaaaaatatgcaaatttggaagagggcaatacagaaagcttgatatctcctggacaagtttctgcttctggtaaagatatacaatcagaatatactgaagttgtcagccatgtggatgaaggctcgatagagaaaacagatgactttcagctcaatggccttccatttgagcacaaccaaaatctgaatggagatgtgtctacagcgacaacacaatttgatcatttgactctgcatgagggaccaaaattgtccgatgataatccggctgtaataattcctgatcatcttcaggtttcgaatgctgattgtgcacatttgacgtttggtagttttgtgtctggaacacttgattcatccttgacaacaaaacctcttgaaagtcatggggatgctgcgacagttcctgatgatgattcaattgaccaatcagatggcaggatccatgacgatgaaggcaaggtgacattagctactgatgttaatgaatatgttacttctgcggcaaacagcaacgaggagaatcttgatattacatcagtacagcaatctgaagtcactagagctgatttcttggatgtcacaagcaatactgaatacaacctaacatcaactccagattatgcaacttcaagtgcaccgttgcaggattctgcttcacagagtttacaggaaaaccgacaattccagaacatctctcctttctcaagcttcatgcaaatgcaaaatggtctcctgccaccagcaattccaccattgcgtgaatttgatccagcattttcactattgctcacccatcctcctatgatgcatggtacaatgtcatcatccatgagcaatacaactgtttctacacagccccaagagaatgccaatccagttggtttacccaaccctcaattgactcaatctcagcaaagcaccagcattgcttcagggcctccactccctcagcatcttcttcatccctatgctcaaccaacccttccacttggatacgcaagcatgattggctatccatctcttccaccaagctatgcatatctcccgcctgccgcttttcagcaaccatacatgaacagtggcttgttccaccaggcagcagccgcagttcccacctcaagtgtgaaataccctctaccgcagtacaaaagcaacattgcccttgctagcttaccacagccaggctctttgctctcaagctacgttgggggctttggaactgcaagcaacatgcctggaaatttccctctgaatcaaagcacagcagcagcaacaacaactcttgggtttgatgggacggtcccttcacatttcaaagatggaaatcaatttatttctcttcagcagaatgagaaccctgcaatgtggatgcatggtgctagttcacgagggatgcccccacttgcagccagtaccatgtatggctatcaagggcagagtcatcaggccggccttcggcagggccaactaccttcacaatttggctctgcgcttgggcagtcacagccaggcctgggccctgaacaccgaaaccctagcgatagtaacctaagtggcgctgctcaggctaaccaaatgtggccaaatacctactgatccatcccccttgtcgacttctgtggaaggcggtcctgttgtgtgtgcaacgccggtgaggccatgcagtgcttgtgttctgatccaggcacgcggataccagctgtgcctgtgcgcatgagtcgctgtcgtgacattttgaggcacaagagacatatgttcgagcatgctctacctgtagggtttctaggatatggcaaaagaaaatgtagctcgatctatttattcaaattctgatagagaaaggacttcctcttttctattttattctcttttgtcattcacatatcatgtgacaaataaaaccgaaatatctaacagcagcgccattagttcccgaggaagtgaaactttacatcacacgtcttgcgtgcctcttggcttcaattttatgattgaggtgattaattgatggatgagcatttcccactcagtgctttgtcaagagaggatgccagattgatcgttgttttgaacatgaacctgtccttgatcaattagtagctagctaggctatgataggcgaggctactctgtccagagccttttaatgttggaggtcagagcgtgacgtacgcgttcttgcagccgcgtgttgacgaatcgtaaaggagtggagtggttgagatcaggggtgcagtctagtttcattgcaaaatggcatgcaagaacaaagaatatcatcatctgtactgtacacatctgcctgctaacaagggcaacgctactgaatgccagtgccagagacacgacgttactggtcgcaa

SEQ ID NO: 5114 - DNA, 2384 bp, Zea mays
catatatatagattaaattattttaaactaaaagaattatatattatggtagttcaagtcatgatgaatctagtaactttacttttatattataaaatcttatgaaatattcgttataacgggttaaagttaatagtggttaacttaaaacaaacccaaaacgactaaatcacgtggacgaaaaaataagacataatattttttaggtttttaagaaaaaaaattattttttttagaaaaataaaatttacttaaaaatagagttatcaaattagttttttaagtcagagaaacaaggtaggagcaggacgatgcgaatagccttaccgacgcgtcctagtccaacactgaccaggccaaatgaagccaccgcaccgccacagccacgacgcgtaggccccgccacaccacccgagcgacttgccttgggcacctcgaggccggccggggattcctccactccggccttgcccgccgatctccagctgtcctccaatcaaattatcaacccaacgccatttcggcgctcccccatctcacagctcaacaaatccctacccaaatccacctccccgccccccaccgctatggctcacccaccaacctcgcgccgcttcgccctcgctctcatcctcatcggcgccctctgcaccgccgtcgccgccgcgcggttcgccccggcggacaaccacctccttgcgtgcggcgcggcggcgcccgccgtcctccccgacggccgccgcttcgtgccggactctggctgcgcatccacccgcctccggtcatcctccccgtccctctcctccgcggcgccgcccggctccccgccgccgccgtcctcgctcctcgcctccgctcgggtcttctcctgccgcgcgtcctacgacctcgatgtccgccgccgcgggcaccacatcctccgcctccatttctaccccttcgtccccgccctcgccgcgtcccgcttccacgtcggcgccggggggctcctcctcctccacaacttcacggcctcgtcccccgtcgtcaaggagttcatcctccccgtggactccgacgtcctcgtgctcaccttcgtccccgactccggctccactgccttcgtcaacgccatcgagctcgtctctgcgcccgaagagctcgttggcgacatcggcaccctagtcacgtccggcggcgccgctcagatacacgggctgtcgtctcaggtgtttgagactctctacaggatcaacgtcgcggggcgcaaggtcacgccattcaacgacacactgtggcggacatgggttaacgatgagaaattcctcatcgacaccgactcctccaactacatggtgtggtcgtccagtggccggattgcttatcccaagggtagcaagcagatgacaagagaagtggctcctgacaatgtctacaactctgcaagatccgtgaggccaggggtgaatgtgacttggggtttccctgtgcctgctagcagccggtaccttgtgcgtatgcacttctgtgacattgctagcaaggctctgtatgagctctacttcaatatctacgtcaatggtgatcttgcagtcaaggatttcgatctctccagtgcaactggattcttggcctatccttattacattgactttatcgtcgatgtgaaggatgaggggatactgaaattggcgattggtggcttaaagaagagtcgatctgatgaagtaagtggtatccttaatgcactggagataatgaggatgaacaagaccagtggaggtatggatggagacttcccaattgatctacacatggaatatgtggtgagtaaggggattggagaatttgcccgctccctgctctgtggtttcatctttgttgggttgtttgtggctttggtcacgctgatggtgaggttgaggaccgagttgaggaataacggcacagcttggtcctggagacagatgaactccgatgaagggaaactggccagaacatatcagcttgtgcccagtaagacggactattgaatattgcaggctgggcatctttgaggagtgacaacctgcggctgttgtgtgcatctaatcacatcatactttttattaagttgtaagtattgtagttttatcacctctctaaaagtattgtagttttgtatcatcactcctttcatgcttggactttgcattctccatgctttgccaatggtcaatggaggacatgctcatgatgctgtaaaagtactctaccctagatgtggctgtattgctattgcctcatttattcagtttgacttctgaaacatggattcacagctgaattgcatttgaatataattagttgtagtggagacatttgattataaaagaaaaaaaaaaaaaaaaaagcggccagcggcc

SEQ ID NO: 5115 - DNA, 903 bp, Zea mays
  misc_feature (121)..(121): n is a, c, g, or t
cccagcgtccggcccaccgtcggggggacgttcttcagtttgtgttgaacttgtgcctcagaaggcctgtgcatccttggagcccaactaccagcctccagttacttttgtcgtggtgcangaaacgacatcacactaggctgtttgctaataaccacaacgatcagcgtacagttgatagaagcggaaacatactgcctggcaccgtggttgattcgaagatttgccatcctactgaatttgatttctacctgtgtagccatgctggcattcagggaacaagccgccctgctcattaccatgtcctgtgggacgagaacaagttcacagctgatgagctgcagactctgacaaacaacctatgctacacgtacgctaggtgcacccgctccgtgtcaattgtgcccccggcatactatgctcatctggcagccttccgagctcgcttctacatggagccagatacctctgacagtggctcaatggccagtggtgcccgtggccctccaccaggtgcggcacgcagcatgagaggagcggggagtgttgcggtcaggcccctacctgctctcaaggaaaacgtgaagcgtgtcatgttttactgctgagatgctgagctaccttcaccaagaaaatatcctgacttgttccatgtacccgcactgtttcggtgatactatctgacaccgaatttatgcattaagtcttccagtggtctggagattttaagtaacgcctgtttttattcgtgagttgtaacgctgcagttcgaggagcttcagtgctgtatgatgtgtaaactatttgttgtaagttgtaaccaattgttgtaagttgtaaccagccactatgttatgatcctgtttgtttcagctttttacaaattttaaaaaaaaaaaaaaa

SEQ ID NO: 5116 - DNA, 2210 bp, Zea mays
catcgcgtgccccgccgccgcccgccgtcccgagacccgattccccgtcccagagacgagagacggcacaacccttgctgccgtcctggtcgccacacggccacaccaacccaacacctcttcttcctccgctctcagcttaccccaccacaggcgagggaggcgactccttcctcgcggctacccgctccggccccgatcgcatctcctttgcacgccacggcccgcgcgcagtgtccaccggcacggccgtcctccgtgtgtgggggcgcatctggtgctagcttgccgggctagggtttggcttggcctcgtctaccgccccgtctcgtctgataggcacaggttccgtgcacgcgatcgtcgtctctccatccgttgtgactgcttgccgtcccccgcttgcttcgtcctgctacgggagggccactgctgccatcgcgtccaccgacgaatttccccacagagcattagagcaattatcttggagttgcagatctgtacctgaagattcatattgaaatctggaagcttctgctgttgagtacagagaaatatttcttgccttttgaggaagactgcagagcccctaaatgtgaaacttgtttcttttcttgtctactcctgaatgctgacgaactcagcctctcacgttacttagctgaaggtcgtactggtacagacaccgaggatggagcaagcaacaggtgtaagtggtcctgaacacataattgatattccaagggaaattggtcctcctgcttcggtttctcgtagtgctggtagagagaaccatgaagaatcgaatcctgtggacaggccttcaacaagagctctagtacctgccttgcaggcaccatcagcaataggtgctgtacctattacagggcatacttcaggcactaggagaaatgacaactatgttcgtcggcacagaagcccattgaattctggactgtggatttcaattgaagttattgttaactttagccagattgttgctgccattgttgttctttgtgtgtcaagaaaggaacacccacaagctccattacttgagtgggtcataggttacactgttggttgttttgcaacgttaccccatctctattggcgctatatacaccgtaatattgtaaatggtgagcatgagtcatcacatacacctcaagggtccgctcataacaactcaaatgaagcgactcatgctgcaagtgcatcagaacgccgcagaaatgctgcccgaaatgctgtgcttgctaatcctaggatcaatgcgctgtttgaccacttcaagatggccctggattgtttctttgccgtctggtttgttgttggaaacgtgtggatatttggtggccgttcttctgctgctgatgcaccgaacttgtacaggttgtgcattgtgttcctcacttttagttgcattgggtatgccatgccattcatcctatgtgcaatgatatgctgttgccttccctgcattatatctgttatgggttttagagaagatacaaacaatacaaggggtgcttcctcagaatctatcaatgctttgcctacatataaattcaaaatcaagaaacgtcgccatggttcaggcagtgaaactgaaggccaggaaggagggatattggctgcaggaactgacaaggagcgatcactctctgctgaagacgcagtttgctgcatctgtcttgcaaaatatgcgcacaatgatgagctccgtgaacttccatgtgcacactgtttccacaaggactgtgttgataaatggctcaagataaatgcactttgccctctgtgcaaatctgagatagtgagctcgtctggtacttctgatgcccgccaatcagaccagaacaccgttcctgtgcaggagatcgaaatgcattaggttggtctgttcccgcagcttatcacataaggatacatctgatttgtggctctcaatcttcatgtataaagttggagattgatgtatggattgtagagacgcgtaggtttttttttgtatttaacactgctatcttggagaagttacagctattctcgctgtcacccaactatggcaagccaatactacccaggttttcccccatagcgtgggctgcaccttatgttctgctcttgatggcattgaaaaaaaaaaaaaaaaaaaaaaaaaaaaaaaaaaaaaaaaaaaaaaaaaaaaaaaaaaaaaaaaaaag

SEQ ID NO: 5117 - DNA, 2358 bp, Zea mays
  misc_feature (2352)..(2353): n is a, c, g, or t
  misc_feature (2355)..(2357): n is a, c, g, or t
agagggtcctgcgttcccttcttctgctgcggcggcggaggctctttcagttccatccatcttctccctcgtggctctccttcctctctcccgtagtcccgccgaccccccgcgccggccaaggaaatcaagcgaagggccgcagaacgccagattttgattgttccacatcttctttcatctctgaggggtttcccgtcttcctcgcctgctctaatggctaaagaacaggatggatcccccaaggtgcgccacccagaattccaaaggatgcgcgtaactctcaccataggtgtcattggcctctgtgtcacagcatacattcttggtgcttggcaaggtacctcgaacggcattagttcccccttaataagtaccagaacccagtgcaaagatcccgtgcgatcatctggtgctcgcctggatttccaagcccaccaccaggtgggcttcaatgaatcggcgcttgctgtggagaaattcccaccttgccagctcaagtacagtgagtataccccttgccaagatccaaggaaagctaggaagttcccaaagaaaatgatgcagtacagggagcggcactgcccaaagaaagaagacatgctccggtgcttgatccctgcgcctccaaactatagcaaccccttccagtggccaaaaagtcgcgactatgcttggttcaataacattcctcatcgggagctcagtattgagaaggctgttcagaactggattcatgtcgagggagacctgcttagattccctggaggtggcactatgttcccacatggtgccgatgcctatattgatgacataaatgcccctgtacccattaattgaaggcaacatccgaactgcgcttgatactggatgtggagttgcaagctggggtgcttatcttatccctcgcgtccgcatcaccatgtcttttgcgccaagggattcacatgaggcacaggtacagtttgcattagagcggggggtaccagccatgattggagtgatggggactgagagaatcccatatccggctagagcatttgacatggcacactgctcgagatgtttgatcccatggaataagcttgatggtgtctatctaattgaagtagacagggttcttaggcctgggggctactggatcctctctgggcctccaatccattggaagaggcactaccagggctgggagaggacagaaggagacctgaagcaagagcaagatgagattgaggacttggcgaaacggctctgctggaagaaggtcgtagagaaaggtgatcttgctatatggcagaaatctatcaaccacgtagaatgtgttgacagtaggaaggtttatgatgctccgcagatttgtaagagcaatgatgtggattctgcttggtacaagaaaatggacacttgcatatctcctctcccagatgtgaagagtgaagatgaagttgctggcggagtccttgagacatggcccaaaagagcatttgctgtccccccaagagtaatccgcggttcagttccaggcctcacccctgagaagttccaagaggataacaaggtgtggtcagagagagtggatcactacaagaaattgattccaccactgggcaaaagacgatacaggaatgtgatggacatgaatgcggggataggtggctttgcagctgcattgatgaagtaccctctttgggtgatgaatgttgtgccttcaggcttggcccatgacaccctgggtgttatttacgaacgagggtttattggcacgtaccatgattggtgtgaggctttctcaacgtacccgaggacctacgacctcatccatgctgataaagttttcagcagttaccaggacaggtgtgacataacgtacatcctactggagatggaccgaattctaaggcctgaggggactgtgatcatcagggacaacgtagaggtgttggtgaaggtacaagctatcactggaggcatgaggtggaagagccaaatcatggaccatgagtccggtccattcaaccctgacaagatcctagtggctgtcaagacttactggaccgggaagctcgtgcaaaaacaataatcgtcgccttgttactgtttttcgtctgcgaaaatgtaggcatgacttgcctgtcagttctgtcttcattgccatttttttatcctaacttcaggatatctgtatataggaggcatgtgaaccatgtagctggaattggtatcaaacatcattagccacgtagcgtatgtgacacattgcaatggtgtataaaatgttcactcatatatttggtgtgatattgcaatctaataacatgatgcttggtgtgaaaaaaaaaaaaaaaaaaaaannannna

SEQ ID NO: 5118 - DNA, 2416 bp, Zea mays
cgaccgcgcgctgtggcaggcccccgccgcggccgccgggatcttcgcggacaaggtgctggaggtgatcaacccggacgacgacttcgtgtgggtgcacgactaccacctcatggtgctccccaccttcctgcgcaagcgcttcaaccgcatcaagctcggcttcttcctgcactcgccgttcccctcgtccgagatctacaagacgctccccgtgcgcgaggagcttctgcgcgccctgctcaactccgacctcatcggcttccacaccttcgactacgcgcgccacttcctctcctgctgcggccggatgctcgggctctcgtacgagtccaagcgggggcacatttgcctcgagtactacggccgtacggtgagcatcaagatcctgcctgtgggggtgcacatggagcagctcaagacggtgctcgggttgccggagaccgaggccaaggtgtccgagctgatggagatgtactctggaaaggggagagtggtcatgctgggcgtcgacgacatggacatcttcaaggggatcagcctcaagctgcttgccatggaggagctgctgcggcagcaccccgagtggcgggggaagctggtgctggtgcaggtcgccaacccggcgcgagggagggggaaggacgtcgccgaggtgcagaccgagacgtacgccatggtgcggcgcatcaacgaggcgtacggtgagccggggtacgagccggtggtcctgatcgatgagcctctgcagttctacgagcgcgtggcctactacgtcatagccgaggtgtgcctggtgaccgcggtcagggacggcatgaacctgattccctatgagtacatcgtctcccggcaggggaacgagaagctggacaggatgctgcggcaggggaagccagaggagaagaagagcatgctggtggtgtccgagttcatcgggtgctcgccgtctctgagcggcgccatcagggtgaacccgtggaacatcgaggccgtggctgacgccatggagaccgcccttgtgctgcctgagaacgagaagaggctgcgccacgataagcacttccgctacgtgagcacccacgacgtcgggtactgggctaacagcttcctcctggaccttgagaggacctgcaagtatcattctcagaagaggtgctggggcattggcttcggcctgcggttcagagtggtctcgctcgacctgaccttcaggaagctttccttggagaacatccttatggcataccggagagccaagacacgggcaattctgctggactacgatggcacgctgatgccacaggcgattaacaagagcccgtccactgaatctgtgcggatcctgaacagcttgtgccgagacaaggacaatgtggtgtacctatgcagcgggtatgaccggcgcacccttcatgagtggttcccttgtgagaaccttggcatagccgcggagcatggctacttcctgaggtgtaagagggacgcggaatggaagacctgtgtcgctgccacagactgcagctggaagcagatcgcggagccggtgatgtgcctgtacagggagacgacggacggctcaaccatcgaggacagggagacggtgctcgtgtggaactacgaggacgcggaccccgacttcgggtcgtgccaggccaaggagctcgtcgaccaccttgagagcgtgctcgcgaacgagcctgtgtcggtgaagaccacgcctcactcagttgaagtgaaaccgcagggcgtgagcaagggcttggtggctcggcgcatgcttgtgtcgatgaaggagcggggccagtgcccggacttcgtcctgtgcatcggcgacgacaagtccgacgaggacatgttccagctgatcgccaccgctgcctgcggggactcgctggcgtccaaggcggaggtgttcgcgtgcaccgtcggccgcaagcccagcaaggccaagtactacctcgacgacgcggcggaggtggtgaggctgatgcaggggctctcctacgtctccgaggagctggcgctggcgaaccagcgggatgaagacgaggactcctctctggacgacgtgtgggaataggaaggagcgttcccttcccgtgctgctcctgcggtaatgtctgtttgtgttgttggctcggctggagctttcgccgagtagtttaggtgtgtaaatgaggtatgcttttcagcgtaatgtattgccagtggtctagtctcgagagctggcttgaatctagtgatgctctagtactttggtttgtggtgctatttacctgatccgtggaaggcagtactatgagctatacaagatgcagacctgaaatctcattcatctgaagaccatgacctttctcctaggcgtgtgtatacgtctttggattttggaactaaaaaaaaaaaaaaaaaaaaa

SEQ ID NO: 5119 - DNA, 1784 bp, Zea mays
ctcgaggccggccgggctccccgtcccgtccaccgattcccctccctaccgcccggcccgccgccaccagacgagagacgacctcccccctcccccgcattctctcacgccgcctgcgctctccccctcgcgagatagacaaccctagctcccgtctccttgcttaccctcctctccaacccctctccgatctctataaaagacccgaatttcgaattccccctcgaacccgcgatccgcgctttccttcccgcccatttcggtctctgattcggcgcggattcgctgcgcgggagcccccgaggttgcgtgcgtgattcggatggcggagccggggctcgagggcagccagccggtggatctgtccaagcacccctctggcatcgtccccacgctccagaatatcgtatcaacagttaatttggattgtaaacttgacctcaaagcaatagctttgcaagcacgaaatgcggagtataacccaaagcgttttgctgcagtcatcatgagaataagagaacccaaaaccacggcactgatatttgcatcgggtaaaatggtatgtactggagcgaagagtgaacagcaatccaagcttgcagcaaggaagtatgcccgcattattcagaaacttggttttccagctaagtttaaggattttaagattcagaatattgttggctcttgtgatgtcaagtttccaattaggcttgagggccttgcatattctcatggtgccttctcaagttacgaacccgaactctttcctggccttatctatcggatgaaacaaccaaagattgttcttttaatttttgtttcaggcaagattgttttgactggagcaaaggtgagagaggagacctacactgccttcgaaaacatctatcctgtactgtcagagtttagaaaaattcagcaatgatgacatgtgatgtgaaggtcacgttcttcaaattacaagcttcctcgaggattctcgtgtgaccatgaattctaaatgtacataaaagtctggcggaacttatagcatcctgtaatctctgtgagccgcggtctgtcagtattgggtgggcttgctgtggtaactggtggacatgtcgagttcatccatttgggtaggccttggtgaacacggacgccccacatcatgtctcagtttgagtagtttgtgtgaactgaagggtacgtgcttctcccatgtggttgcagcgttaacttgagtcaagtgctaacaagagtagataaaattttgccccagttcgtctttgtgacagtcttttaaagtcttttttctgagtatctttcaaagtgttttcagagtatcttccagtgtgctactgctgtgcgatgatgagaaggctggcactgtatgtaacgggggcaacgtgaccggttgtaagttatgtattgtagttgagatgctgtagcgcctagggcactgggattgaacttgtggaggaaccagtcagtcgaccgttctatttgtgtggccctctgctactgactaatgtggcctgttccaaatgtcgctgcgattttcgtttcttttaccatgttgatgttgcatgctaaggtgcaagggtgaagaatttggatgccaccagagatgcgtgtccgggaaagaaatgctcagcgaacatgatgttcctgggctcatggcgcagccacatgcctgcctcgctcgaaaacactttcgtatgcaatgaaatcgacgttgacgagttcctgggttgcgcatttctatcctgcagctgcaggcaggctctagaggggtccccggg

SEQ ID NO: 5120 - DNA, 2484 bp, Zea mays
  misc_feature (737)..(737): n is a, c, g, or t
agtctggctgcatgagccaggactgcgggaatctggctccagggatacgaccaatttgctcgcgtctatagagcctggtctagagtgctttaagtaccgtgcgagtctggtttcactctatacgtaggtaaccaaacatacacctcgcacgcgtagagcctggttaacaacaaccaaacaccagctcattacatcccatcatgtaagcaccagcaaatacatgcagccaaacacatagttaagggttgtttggttctatatctatggtgccaaaacttgccacgcaattttacgccacacttgactaatgtgactaaggttaggcgttcaaattctacgccacaatttgccatgtctaaaagaatcttgccatacttttaccagtcattgacgagtaagatctatgtagcaggaaaaaaatgttgctacaactatggtttcaaaccaaacacatgaccaatttgatcaaatttggctaaatttagatgtgacaaatcgtggcaagttagacagtaaattaaacaatccttagtttgttagatcatgatctaatttgtagacatgaccgtgatttactagagagtttccataaatctacacgaggtagtcaaatagacttttgtggatatttgtatgcatactttttgtagagcgttgctatacatgactttattgatagactcaaatacaagtaaggccgtctagtagtctatgatttattagtttaaaataagganaacaacaacaacggtagattaacgttgttcgtacactcatactccattcgtatggatgagtggtacacgaaggacttctctttttttaagttacatgaacttttccttccaagtaaaaaatcggcagaaaccattgtcgcatccacatccccgtcactcccgcccgccaaatccattgatgacaaagcggccgagtcgcacactccaatgaagggaagctttggttggttgactgctccatccacccaccccctacagttcagttcagttcagttggtctaggccatggccatgtccgcttcctcctcctcgcgcgccctcctccgccggatcggcggcgcgctcctccgccgctccttctcctcctcatccgccgcctccgcagggtaccacgtcgcgggcgggcccagctacatgcgcggcgccgtcttctgggagcccggccgcccgctcacgctcgaggagttccgcatgccgcggcccaaggccggcgagctcctcatcaagaccaaagcctgcggggtctgtcactccgatctccatgtcctcaaaggcgagctccctttctccacgccctgtgtcgtgggccatgagatcactggagaggtggttgaccatggcacgcacactcctgttgagatcatcaacaggttcccagtcggaagtcacgtcgtcggcgccttcataatgccatgtgggaactgcttctactgcgttaagggccaagaagatctgtgtgagtctttcttcgcgtataatcgtgccaaggggacactctatgatggcgagacacggctgtttctaaggggcaatgggaaaccggtgtacatgtatagtatgggagggcttgcagagtattgtgttgtcccagccaatgcgctagcagttctccctgactcactgccatacacagaatcagcaattttaggatgtgcagtgtttaccgcgtatggtgccctgaggcatgctgctgaaatgcggcctggtgattcagtagctgtgatcggagttggaggggttgggtcaagctgtttacagatagcaaaagcctttggagcttcccaagtcattgcagtggatgtccttgatgagaagcttcagaacgctacaacacttggagcaacccacactgtaaatgcagcaaaagatgatgcagttgaaaggataaaggaaattactgatggtaggggtgtagatgtggctatagaggcacttggtaaggcgttaacattttcccagtgcgccaagagcgtgcgtgatggaggcaaagctgttatgatcgggcttgctgcaacgaacgtaatgggagaggttgatataacccgtcttgtccgacgacaggtgaaaatcattggctcatatggcgcaagggccaggcaagaccttcctcagatagtgaagctcgcggagagtggtgccttcaatctccaaaacaccatatcaaggaaatgcaaatttgaggaggcgaatggcgcctatgaggatctcaatcagggcaagatcgtaggacgagctgtggttgagatcatggagtgatgacggacaaggtaatcaatcctgtggttccaagtctgggtcacacaacaataaagttttgcgtgctctttcacagcattgtcaaaatctgtagatgaccaaactgcattgtgtgtgtgtgtgtgtgtgtgtgtgacagtgtgttgttggaattaacatttgcccttaaaaaaaaaaaaaaaacgcccccgtgctcagctttgaaaaacaa

SEQ ID NO: 5121 - DNA, 3283 bp, Zea mays
aattcggcacgagggcctgcctcccctcacgagctccctcctctcccgctccaccaccggcggctcctccgcccgcggcgtggcggtggccgcagcgatctccaggcccgccgcggacgccgccccttcctcctcgtccccgcctgcccgtccgaccccgaggccgcgcccaagcccggcgtcgcccttcgcgtccggcctcgcgggccgcctcttcggcggccaccgcgccgccacccgctccgcgtcgtctgcggccgccgtcttcgagcgccggtttgcctcagccgcgaccaggaactcgtacgatgaaatactgacgggcctcgggaggccaggaggcggagaggagtttggcaagtactacagcctgcctgctctctccgatccgcggattgatcggctcccatattctatcaggattcttctcgagtcggcgatcaggaactgcgatgatttccaggtcaccgggaaggatgttgagaagatcttggactgggagagaagtgcaccgaagcaagttgaaatcccgttcaagcccgcccgtgtcctcctccaggattttactggtgtcccggctgttgtcgaccttgcgtgcatgagggatgctatgagcaaactcggcagcgacccgaacaaaattaatcctctggtacctgtagaccttgttattgaccattcagtacaagtcgacgtggcaagatcagcaaatgctgctcaggcaaatatggagcttgagttctatcgtaacaaggaacggtttgggttcttgaaatgggggtcctctgcattccgcaacatgcttgttgttccacctggatctggcattgttcaccaggtgaatcttgaatatctggcaagggttgtgtttaataatggtgggatcctttaccctgacagcgtcgtaggcactgactcccacacaactatgatagatggtcttggagttgctgggtggggagttggtggtatagaggcggaagctgcaatgcttggccagccaatgagcatggtcttgccaggggttgttggcttcaagttatcaggcaagctgaggaatggagttacagccactgacttggttctaacagtaacccaaatgcttcggaaacatggtgttgtcgggaaatttgttgagttctatgggcaaggcatgagtgaattgtcacttgctgatcgggcgaccatcgcaaatatgtctcccgaatatggcgcaactatgggtttcttcccagttgatggaaagacgctggactatttgaagcttactggccgaagtgatgatacagtggccatggttgagtcctacctgcgtgcgaataagatgttcgttgatcacagccaggctgaagctgaaagagtatattcttcttatctagaactgaacctggaagaggtagaaccatgtctatcgggaccaaaacggcctcacgatcgagtgacattgaagaatatgaagtctgactggctttcttgcttggatagcgatgtaggattcaagggttttgctgtccccaaagagtcacaaggcaaagttgcagaatttttgttccacgggactcctgcaaagataaagcatggtgatgttgtaattgcagcaataaccagttgcacaaacacatcaaatcctaatgtaatgctgggagctgctttggttgccaagaaggcttgtgagttaggcctggaggtaaagccatggattaagacgagccttgcacctggttctggtgttgtgaagcagtacttggataagagcgggttgcagaaatatcttgaccagcttggcttcaatattgttggctatggttgcacaacctgcattggaaattccggggagcttgatgaatccgtatctgctgcaattactgagaatgatattgttgctgctgctgtattgtccggaaacaggaattttgaaggacgtgtgcatcccttaactagagcaaattaccttgcttcccctccattagttgttgcttatgccttggctggcacggttaatattgattttgagaaagaacctattggcatctcgaaagatgggaaagaggtttacttccgggatgtttggccatcaacagaagagattgccgaggttgtcaagtcaagtgtgcttcctgagatgttcaagagcacatatgagtccatcacccaaggaaatcctatgtggaatgagctgccagtctcaacaagcactctctatccctgggatccatcatctacatacatccatgagcctccttacttcaaggatatgacaatgactcctcctggcccgcgaccagtgaaggatgcatattgccttctgaactttggtgacagtatcacaactgatcacatctcgcctgccggaaacattcacccagacagcgcagctgcaacatatctgaaggagcgtggtgttgaaaggaaggacttcaactcatatggtagccgaagaggaaatgatgagatcatggctaggggaacctttgccaacattcgtctcgtgaataagttcttgaagggtgaggttggacccaagacaatccatgttccatccggggataagctttcagtttttgatgctgctatgaaatacaagaatgaagggcatgatactattatcctagctggtgccgagttacgggagtggtagctctcgggattgggctgcaaagggcccaatgcttcagggagtgaaggctgtgatagcaaagagctttgagaggattcaccgcagcaatcttgctggcatgggaatcatccctctatgcttcaaagcaggggaggatgcagacaccctgggcctaaccggccatgagcgctacacggtccaccttccaaccaatgtgagtgagataaagcctggccaagatgttaccgtgacaactgataatgggaagtcgttcacttgcacactcagattcgacactgaggtggagcttgcttactacgaccatggtggcattctaccatatgtcatcagaaagattgcggaacagtagattgagatgattgcgatgcggtgaatcgtaattggtgtaaacgacccatttttgagtacttataataacctctgagtttctcagagtgagctgtctgaacttttagtaaccttttgctttctttaagacactgttaataatatgttaactcctgcaatatctgaatatacatttggcagatgattccctaaaaaaaaaaaaaaaatagttcataacactgacgcagttcaaagcggttcttgttatctggtggtactcaaattagtactgcaaaaaaaaaaaaaaaaaaaaaaaaa

SEQ ID NO: 5122 - DNA, 2607 bp, Zea mays
caggaaaaaaacccggtgttctagccgcacgcatctcaaaggtgatactgggcggggcgatttggagatgatgttctagcactagcagcacgcacgcatctcaaaggtgatactgggcggggcgatttggagatgatgttctagcactagcagcacgcacgcatctcaaggtcatactgggcggggcgatttgcgagtcctgtggcctcgtgggccacgtgcacgcagcagaccgcaggaatttgcacgagaccagtacctagaacaccctactccagcgaaatccgccacttcgtcgtcgtcgtcgcacggattggcattggctgccccccggccctgttcctcgtcctcctcatcaattcccgtctctcagtcctcccaataatggtggcgtggtgagaaatccttccgtccggccgtcgtcttagaagatgaactgttcctcttgctgcgccgctgccactccatcttctccggcgcttctcgccaggccgcgggggggtttagctgctagctgctccacgacgacagcaaatcagaaggtgcttttcctgggctcaaaacagtttccacggatcacgtatagccgtgcgtcgtcacggttgtcgcggagagaggtaatagcttttgccgggcaacaaccttgggacatcggcagatttgtcaagacgctgtatttcttcaacgggcctccaaaccttctcaagattgtagaatctatcatcagcagtttcactggacctgcttctagtgaagtgccaaagaaaatggaaacgtcggatgtggtgctggttactggagccaccggtggtgttgggcgacgggtggtggacgtcctgcagaagaagggagtacctgttcgagtattggctagaaatgtagacaaggcaaggagcatgttggggccggatgtacctctgatcataggagatgttacgaaggaagatacacttgatcctaagctattcaaagggataaaaaaagtagtcaatgcagtctctgtcatagtggggccaaaggaaggtgatacgccagacaggcagaagtacaaacaaggcatcaaatttttcgaacctgagatcaagggaccttcacctgaaatggttgagtacatcggaatgcaaaacttgattaatgccataaagagtagtgttggactgagtgaagggaaactgctatttggtttcaaaggcaacttatctggagagattgtgtggggagctcttgatgacgttgtgatgggtggtgttagtgaaagtacattccaaatcttgccaacaggaagtgaaagtagtggaccaactgggttgttcaaagggactgtatctacttcaaataatggtgggtttactagtataaggacaaagaattttactgtgccagaggacctgtcagcatatgatggtattgagttacgagttaatggtgatgggcgacggtataaactcattatacggactagctatgaatgggatactgttggctatacagcaagttttaacacaactaaggggggatggcaaagtgttaaagtacctttctcttctctgaaacctgtattccgtgctcgtactgtgactgatgctccacccttcgatgcaagcaacattacttcactacaactcatgtttagcaaatttgaatacgatggaatactcaacccaacatttactgaaggtccgtttgagcttcctttttcgagtattagagcatacatcaatgagccgatcactccaaggttcgttcatgtgagttctgcgggagttacaagacctgaaagaccggggttagatttaagcaagcagccacctgctgttcgattgaacaaagagcttggctccattttaacttttaagttgaagggagaggatttaattcgggaaagcggtattccgtacactattgtaaggccatgtgcattaactgaggaaccagctggagccgatctcatgtttgaccagggggacaacatcacaggaaagatatcaagggaagaagttgcccgtatttgtgtagcagctctggcaagcccagatgctgtgggcaaaactttcgaggtcaagagcactgttccattcagcgaaccgtatgtgattgaccctgcaaatcctcctcctgaaaaggactatgaagtatatttcaaagaactcaaagaaggcatcacgggtaaagaggcgttagaggcaacacctgctcaagtttgaagatgtcgttgaattaagaatttcgtctgttttcgtaaattctgacacagtaacccccactctgaatgtctaaagtcatctagaaacatagatgacactaatgctaaattttgtagctgaagatcagaccaataaatattcccaagaacacattactgttaggttgggggatcattaaactcgagctaagacacaaatatgtagatgaaattagtgctgctgttcatgccttcgttggagttagccattacaggacacaagaatttagtaagaggtttggcaaaaaaaaaaaaaaaaaggagcagctgcctgatgagttggtagagtggttgctttcagtcaattctctagggtgcctatctctatttaacttgatgctgcacactgggggctcccttcagtc

SEQ ID NO: 5123 - DNA, 5291 bp, Zea mays
ctcgtaattgcttactagtagtattgtttatgctttagctgtgtgactggagctattcaactctcactcacccatgtcatcccgaggacctgcgttctgtcagttgaacatacatgtcgcaattttttcggtgctcaaatgtttcggtgctactacggttgggccccgtgtgctcatggattacctgtcagatccatcgtacgttaggcaacttaataagctcttcctctgtcgtgcaccctcatcgttcttgaatggcagctaaaacgtcgtttcggagttagctttattgctcagtgattattggttatgcttgctagcctgacggaagacatgtgcgtgccaacccctacgccacgcctttttttttcttcgtttctggaaggaagtctcattcttggctgctgcatttccttttcctttcctttttcttttttgttgttgctgaaatggttgtaaccttgggcctgggggcgttgcgctgttctcctcagcctccagctcgtaacggccaaacagacatgacgtgccagagacctaacgctgatggtgactgactgctacggtggttctttcacatgaactgccaccatattatacctgtaggtcttctctaatgcatgcggcagttccggtcggcgtgtgcccgcgtcttttgccttcgatgtgcgagtgctatcgattttttttttgacagacgtgacctggctgttcatgtgaaaggtactcccagcccaagctgttgtgttgtgtcctccctaagcaacgtgaccctctcctttaatttcttgctgatgcaaactgcgatggttttcgctccttgtttactccaacttttttttttgttttcctcaggtattcggacggcgggtgctgctcttgtccccactccacccccctctttttttttttctaccaaacgtgctttttgcttgttaagcaaccgcggcctattccctcgagatcttaatgagcggagcggatcagcggagggtgtgtgatcgtgaagccatgccgctccttttccttttgctggagcggtggccgccgatcgagtaaggcgtcgcggtcgcggcggcaggttggaggcagcgtttgcgttgatgcctgatggcaggctggctggaccagtggagaaaataataataattaaaaaaaggacgcatctgtccctcgcagcacctgatctgtctacatttctacaacagacaacacaaccacggaaggggcgtgctgcatccatggccatgcatgatccatgcatggtgtgtgatgtgatggagaccgtgggactcatgccgtctgcgctcacagcctccggactgggcaacgacgatacgataccatcaaattcgttggcagccccactgataccacgtgattaaccagctaaatttaatcattccaacgtgtacatttctgctctaatacggtgactatctccagtagactccctgtcctactatacaaacagtataatctccagtgctacgcgtaccggagatggatggcctgtatagtctaccgtctcctactctcctaccaaaacataagtctcaccaaaaaaaaaaaaggaccaaccgacggatctgcaaagcaaacacggtcccgtcctgaatggccccacgtcctggatgattctcctggtagtacgctggttaggctccccaccaacacgccgacgaaggccgaacccccgccttggtcaaacgaaccacgtggtgggctagagagtggagacccaataggaagcacggatcccaaacgtggaccagcgaccgacgcacgcaccgacgaaaaatggcccacgacctaacgaaactatttacacaaatctcccaaaatgtatcgaccgaggcagcagtagtatcgtcaccaaggaagagggccgaagggcggaggaaggcgggtataaaatttggcgggttctcggttccgccggcgaagcgtttacttcttcggccgcgatctcgaggagggagggagcgagcgagcgggaagaaagaggggggcgcgcgcgcgcccatgttttgacctcgcccggcgtcgtctcggcagcgatctagatctgaggtcagttccctcccctcccctgatctccgcgctcgtcactccttaacccactcctcggccacagatccaggcgtgtctgtcactagggcttgggatttcatttcttcatccgttggtaagggagggagcactggtttgcctagactagatgcatgcccgttttgttccgcaggatcgtttcttactttctttgttgtggttcctgcgccctgaacacgacgagtacttgattctggcatggatgtgctcccgatccacaaagctggattcgtttgctgcgtttagatccactccgtttgaattgacgttgtctccgccattattcatgcggtggagcaacatgtcttccccccttttttttctgttatagcagtttattttcagaagtttctggcttctgggttctaccgaacctatgccacatgttaatttaatcctggagttttatcttttttattatcccgtatatcttgatatctccacgggaaaacggagactggaaggggaaaagagagagagagagagaggcaatcttaagaatcgaattgatttattattctatgatttttttttgcaggttctgaggttcttgattgaccgcccgcccggcctgtcactgcaatggtcgccaagatgttgccatgctcatggatctcggcgtgcgtgctcgtgctgctcttgagcctgcacccgcgtgtccatgccttctacctccccggcaccttcatgcacacctactcccctggagaggtgatctcggccaaggtcaactcgctcacctctatcgagaccgagctgcccttcagctactacagcctgccatactgcaagcctctggatggcgtcaagaagagtgccgagaaccttggtgagatcctcatgggtgaccagatcgacaactctccataccgcttccaagttaatgtcaatgagtcagtattcctttgcaccacggacccgctcaccaaggagcaggccgagctgctcaagaggagggcacgagatctgtaccaggtcaacatggtcctggacaatttacccggtcatgcggttcaccgagcagaacggcgtgataatccagtggactgggttcccggttgggtacaacccgatagggagcaatgaggattatatcattaaccacctcaagttcagagtcttggtccatcagtaccaggcgcagggcgatgttgtggtcacgagtgaggatggtgttgcaatggtagagtctgatcgcaagagtgggttccagattgttgggtttgaggtcgtgccttgcagcgtaagacgtgatcctgagtccatgtccaagctcaagatgtatgacaaggtcgactctgtgaattgcccgttggagcttgagaaatctcaggcgatccgtgagaatgagcggatcacatttacctatgaggttgagtatgtcaagagcaacatcaagtggccgtccaggtgggatgcgtatctgaagatggatggtgccaaggtccactggttctcgatcatgaactcgatgatggttgtcttcttcctggctggtattgtgtttgtcatattcttgaggacggttcgaagggatctaacaaggtatgaggagatggacaaggaggcacaagctcagatgaacgaggagctctcaggatggaaacttgttgttggggatgtcttcagagagcccagctttccaaagttgctgtgcgttatggtcgctgatggtatccagatcactggtatggcagttgttacaattgtgtttgctgccctgggatttctctcacctgcttccaggggaatgctcctgaccggaatgatcattctctacctcttccttggtatcattgctggatacgttggtgtccgtgtctggaggactatcaagggaacctcggaagggtggaaatctgttgcttggctgactgcatgcttcttccccgggattgtgttcatcatcctcactgtgcttaactccattctgtggggcaagaagagcactggagctctacccatctcactgttcttcaccctcctggccctgtggttctgcatctctgtgccactcacacttattggaggcttgctaggcacacgtgctgcaagcatcgactaccctgtccgaaccaaccagatcccacgagagatccctgagcgcaagttcccctcatggttgcttgtgctcggtgcgggaacattgccatttggtactctcttcattgagctcttcttcatcctttccagcatttggttgggaagattctactatgtgtttggcttcctgttcattgtcctcttcctgctggtcatagtctgtggtgaggtttctctggtcctgacctacatgcacctttgcgtggaggactggaaatggtggtggaaggccttctttgcttctggctctgtcgcattctatgtgttcctctactctattaactacctggtgttcgatctcaggagcctgagcggaccagtttctgccacactctaccttggctattccctgatcatggcccttgcaatcatgctctccactggcgccattggtttcctgctctccttctacttcgtccactacctcttctcgtctgttaagattgattagaggtgtgccccgctgcctctttctgcaatagagtcatctgatcatggtaatagttaccctcttagaaatactacacaataaatcaaatggaaaaaatggatacatggcaacgcccatggcttttggtcatgattaattcaatcatttagcgcagcacagtcactcaagttgaaacttaattcttaggaatgattgtaagttcttcagctatgtttattgcactttgtaataccattcagttttgcttgctctgggcatttgtgagcagcctttggttttggaacacttgagatctattcaatatgaaaatgaagctattcatttacagttcgttactaaaaaaacaagataaaaaaaaaaaattaagacaatattgtagccgtccacaacactgttggtgcacagttctttcgaggtctctctgccatcaacgtcgatccgccccaccctcctccccatgccgtcgaggacctcctaccccttagctccacgattacggggatccgaggccgccatcaacgccctcctccccacaccatcgatggcgcgcgcaggcaacaccgcccatgatcctcggctgatcctcgccatcaacgcgtaggcaacaccatcgatgaacaccgcc

SEQ ID NO: 5124 - DNA, 2090 bp, Zea mays
  misc_feature (10)..(10): n is a, c, g, or t
  misc_feature (208)..(208): n is a, c, g, or t
  misc_feature (220)..(221): n is a, c, g, or t
  misc_feature (236)..(236): n is a, c, g, or t
cagaaatcantatttttggggaccgtagtcctggctatgggggggaaggacgtataaaaaaagtcctcgctactttgaggttgtcgatgacagatctgggaaaaacaactccagttcaaaggtttgaagaccgttggtcttcggagcccagaaaaccagatagtggatctccagatttccagaaagaaggtggggggggggaggctgngttacgtccagnnagggatatattgggngacaatactcctcaacttcgggttggggaactgtcaaagccagctactgaacctccaaagccaagcgtagtcagaccaattgatcctccaaagccgagtgtagtcagaccaattggtcctccaaagccaaatggaaccagggcaattgatcctccaccccgcacgaggacaatatctagtgccagcagcattggttcttcagaaggcacatcagaacagacaaaggtggcaagtgctgtaagtttaattgattttagtgcagatcctgaacctgcgtccacagcaccaccacaacccacccctatgccacaacaacctccatttaacgcagcagcaccacagcctattcttgaacaagggaaaagtgttccttctgtcagtggtggtgactgggcatcttttgattcttttggccaacaacaaacactacaaacaagcagcagtgtaaatcctcttgagtctgcacttgcacagctgtcattctctgaagcaccctctgcaccaaatgtgtcagcttatcctgtttctcttgatcccactttgaaagcaaatgatggaggacattcatctgtgctagaccagtcacattccttgtttgatgcgccctttggaatctcaggcaaccaggcctcaacagtaatgtccggccaaggatcatcagttcaacaatctcctctagctgccccaacagctggacctccatctcaagctactgcaaatccacaaggaaccagtggtattcaaggagcagcctcttctactgacagtaaattcagtagcaggaaagaacttccagcggatatctttactgcactatatccaccatcaactcaaatgatgcctggctggcagagagctccccattttggaatgggatacgccatgcaatatccacctggagtgggattgcaatcgtatcttcacggagcatttcctcagcctacatatcagcaacctgtatattcacaacatgcatattcccacccccaacctgtgaaagcttcaaacccttttgatcttgggaatgagtcagctcatattcaagctcacatgcccccatctgggccacctggagcatcagcaggttcagctccccaaaccttaattcgtaactctagttttggtgttcctccacagcagcctcaccagctctatcagtcagaagcgcatctaagccattttatgatgcagcaagttccgaacagcatgcccatgcctgaacaacaacctaatagcatgcttgcaacgcaacaaggtttgggttccttcaacatgggttttgatcagcaagctcctctcggatacccccaggcaaacacctcaccttcctacggctccgttggtggtggtagtaatccatttggctgaaagaagtgtggaaatacctgatcgttcatcactagacgaagggtctgcagcactcagggggacagacatgcatcgaagccctggagagattgtgtttcatacaacaaggtggtgtatcttgtcggccgtagtctgttgtacaacttgtttccaaaggcttaatgatcgaatataactctgttttggagggcctaagctgatttcagcctcattccatgtacattgtgtctggcgttctgcttggattgcatagtatgtatattgtgtttcttcgttgttgtcatggacagtgtcagctcctgttttagtacaagttgtttctagtgcacttgattattcgatttaatgtggatgattagtacactatagatcagatgtagaatcgtgatcgatcaattttgtggtttctttttacttgctatcttagtaccacttagggcggacgcgcgcgttcgtgagcgttttttcttgtggaactcattcttg

SEQ ID NO: 5125 - DNA, 2405 bp, Zea mays
ttgggtacctcgaggccgagccattcccgatcccgccccaaccccaatcgacaaacgccgccccttctcgtctcgacctctccccaccggctaaccctagcagcggcacgcgggcgacggcgaccagtagagggctagtcgcgccaccggcgaagggattcagcggtctacccgtcctccgacacaggcgcggcggcgtcctgcagattattattggtttgttgcaaaatgtctacggaagcgactttgaacaattctggtggttctgaatctgcattgctgttactggaacagcttgctgaagtttttggaaagttgaaaactcacaccgaaacatttctgcatttgcaaaatggcataaaatgggaagatattgaagggcatttcctcagccttgatgagtcgtacagaagcaagtttgatgaactggtagagaaggagaaggcattagaagaaaagaaagctgaagcttgtagattgattgcagagaaagaggctaaagtttctacaaaagagcatgcctcactgaatcagcttcaggagctaagggatgctgctgtctcttctctagcagaggttcgacaaaaatataaggtggagcttgctgagatacttgaagcaagtggaagcaaagacaaaaaggtaagtacctcaatcaatgacaacaatgcatctcgtgcttcagaggagaatacccctgctagtgggtcgggcgaggcatctgaagctttacctgttgagactaagccgcgccctgtattgaagcaactatgtgaacagatggacaccaaaggccttctgaaatttctttcagaaaactgtagaaaacttgctagctttcgtgatgaactttctgttgcactaaaatgtgcaactgatcctgcacgcttcgtacttaattccctggagggtttcttcccaccagaccaaactaattcacctgggagtaaacataatgcccttgaggtccagcgcaagagctgcattcttttaatggaagctatagcacctgcactagggatgaaggagcctggtggcgacgacccttggagctctgaaattaaggagcaagccaaggaaattgccgaagagtggaagagtaagttagctgagattgacctggatgcttctaatggctattcattggaggcacaggctttcctgcagcttcttacaacttttaatgttgattcggtgcttgacgaagatgaactatgcaagatcgtagttgctgtctctcgtcgcaagcagactgctgtatcctgtcgctctcttggtcttaatgagaaagtaccaggtatcattgaggagttggttaagcggcacaggcaaattgatgcagttcatttcatacaagcttttgggctttcggagacattcccccctgcacctctgctgaagacatatgttgaggaacaaaaggatacaattgaaaataatggcgatgcaactgcgatctcattaacggatgaccccaaatctagggagctaattgctttgagggctgtgattaagtgtatcgaagagcataagcttcagaaggagtgttcacttggacctctccagaagcgtgtttctgagctgaagcccaagggtgagaaaaggccatcaagtgatgctgggcgtacttatgcaaagaagcctcgaggccctggcatttcatttcctaggagacctgccggttctgttggttcagctgctcgcaggcctccatttccgggctatacctggcagcgtgctcctgcgccgatgccctcccgtggtcctgctccagtgccctcccgtgcccctcttcctgcccctcttcctgatagatatggagctgctgaccggtaccattacacaccaccagccccagcatacgactctggtgcattttcgtcttacagtgaacctttcagtgccccaaaaccattccagtacactccagggtcagtggcagcatcatacaattcaagcccctataaagtcgcttatggtggcccaggagcaccagtcagaagcacctatccaggttatgccagcgcatctgggccggctgcttccagcagctatgcaaattatatgggatccgtatatcgccctccccagcaaccatagattcgactcctccctcaaaaaatgttgtgctggtgatgcaagacatggaaaccagtccctcccatccaactcccatggcggagatgtaaacttgagctattttcttgtttcatcgtccacaacagtggggtttggaggtgtatactgatgctctcatgtccagctacatctacaatgtaccttgcactcttgtttgcttttagctgtgcttattcctgagtcgttgaatgttttatattttctttccacaagtctgtctcatgtagggaactgtctcatctaggaatataactcctttacttgct

SEQ ID NO: 5126 - DNA, 3119 bp, Zea mays
ctgcagtggcacgtcctgcactaaacaaatccaacacggcgtgctctctcgccattaaaggcacggtctttctctctccttcgctcctttctgtttctctctccagagtggagtggttggtgctctcagtcccaggacccagggtggccgtggcctctgccaatagggccgggccggggctccaccgcacaccgggagggagagatggtgggaacgagcccagggggaggagtgttctgtttctcctccatggtctcctctcctcggctcctcttcctgctcctcgccggcgcctcgctatgctgtgtggcggcgcagaagacggacacgctgcggcagggggagtcgctgtccggggcggcgacgctggtgtcctcgccggagggggtgttcgaggcgggcttcttcgcgccggaccccaagcagccttctcgccagtacctcggcatctggtaccacagcatctcgccgcggaccgtcgtctgggtcgccaaccgcgtcgcgccggccacctcggcctcgccgtcgctcacgctcaccgtcaccggcgagctccgcgtcctcgacggcacggcggccaacggcaccgccgacgcgccgctgctctggtcctccaacaccacctcgcgcgcgggcccgcggggcggctactcggcggtgctccaggacactggcagcctcgaggtgcgcagcgaggatggggtgctctgggacagcttctggcacccgacggacaccatcctgtccgggatgcgcatcaccttgcaggcgccagggaggggccctaaggagcggatgctgttcacgtcctgggccagcgagacggacccttcgccggggcgatacgcgctcggcctcgacccgggcaactccggtcaggcctacatctggaaagatggcaacgttacgtactggaggtcgggacagtggaatggggtgaattttataggcattccatggaggccactctacaggagtgggttcacaccggcaattgatccagtgcttggaaattattacacatacactgcaacaaacacttctttgcagaggtttgttgttttgccaaatggcacagacatctgctacatggttagaaaatcttcacaagattgggagcttgtctggtaccaaccatcaaatgagtgtgaatactatgctacatgtggtccaaatgcaaaatgcactgcatcgcaagatggcaaggcaaaatgcacctgcctaaaaggttttcatccgaagttgcaggagcagtggaatgcaggaaattggagtcaaggttgcatcaggagcccacctctgggttgtgagaccaatcagtctggggatggatttcttccaatgggaaacataaagtggcctgatttctcatattgggtatctacagtgggagatgagcctggatgcagaactgtctgccttaacaactgctcatgcggtgcttatgtttacacagctacaacagggtgcctagcctggggtaacgaactaattgacatgcatgagttgcaaacaggggcatatactctaaacctgaagcttcctgcttctgaattgcgaggacatcacccaatttggaaaatagccacgataatatcagccatagtgttatttgttttggctgcttgccttcttctgtggtggaagcatggtagaaatattaaagatgcagtgcacggaagttggagatcaaggcattcgtctacccaatcccagcagaatagtgctatgctggacatctcgcagtcaattcgttttgatgatgatgtggaggatggaaaaagtcatgaactcaaagtgtactcgctggaccgtataagaactgctacaagtaattttagtgactctaacaagcttggagaaggaggatttggtcctgtctatatgggaactttacctgggggagaagaagtagctgtgaagaggctttgtaggaattcaggtcaaggccttgaagaattcaagaatgaggtcatacttattgcaaagttgcagcaccgcaatcttgtaagactactagggtgctgcatacagagggaagagaagatcctggtgtatgagtacatgcctaacaaaagtctagatgcattcctctttaatcctgaaaagcaacggcttctagactggaagaaacggtttgatataatcgaaggcattgctagagggctgctatatctccaccgggattcgaggctgcgagttgttcaccgtgatctcaaggccagcaacattctcctggacgcggacatgaaacccaagatatcagattttggaatggcaaggatgtttggaggggaccaaaaccaattcaacacgaatcgggtcgtcggtacatttggctacatgtctcctgaatacgcaatggaaggcattttttcagtcaagtctgacgtctatggcttcggagtcctgatcttggagatcatcacaggaaagagggctgtgagcttccactgtcacgaggactccttgaacatcgctggatatgcgtggcggcaatggaacgaagacaatgctgcggagctgatcgatccagtgataagagcatcgtgctcagttcggcaggtgctgagatgcatccatattgcgttgctgtgcgtgcaagatcacgcagatgagcgacctgacatccccactgtcatccttatgctgagcaacgacagctcgagccttcctaatccgaggccgcctacgctgatgcttcgaggccgtgagatcgaatccagcaagtcaagcgagaaggaccggagccactccattggcactgtgacaatgacacagttgcatggaagatgaagtataacacgaaaaatatactgaatttgtgatatatttggttttttttgttctcccttcctgatgttgataatttgccatttgtcgcggattagtttcctctttttctccttttcatgacggcgaccgcgaagttgtatgaaaatcacattagcgtcatacattaagtgacaattaattttgcaaaggtgagatatttaccaaaaaaaaaaaaaaaaaaactcgtgttgttcggttatttcaattccatatggattgaaagtgtattaggatgtattttgatttgctatggatttaaaccgtctcaataaattatctcaaaa

SEQ ID NO: 5127 - DNA, 3199 bp, Zea mays
  misc_feature (3170)..(3170): n is a, c, g, or t
gaagatagaagctgaatgccgacagataaagttggttgatgctccagtatctggtggtgtcaaagggcggcggatgggacactaactggacagatgaagccctccattgcactggttctgttctatcagcgctgagtgaaaagttgtatgtaatcaaaggaggatgtggagctgcaagttctgttaagatggtcaaccaacttcttgctggggttcatatagcttcagcagctgaagccatgtcatttgctgctcgactaaatttgagaacgagaagagtcttcgaaattatgcaacatgcaaggggttattcatggatgtttggaaatcgtgtgccacacatgctcgataatgattatacaccctattctgcagtggatatatttgtcaaggatcttggtatagtatcttgtgaaagttccaattcgaggatcccagttcacgtctctagtatagcccaccagctgtttatttcaggatctgcttctgggtggggtagatatgacgatgctgccgttgtgaaggtctatgagacattaactggtgtaaaagttgaagggaaggctccgatgctcagtaaagaagatgttcttcagtctcttcctgctgaatggccagaagatccaattgataatcttgtacctattgcatctcatagtagcaaaaagtttcttgtagttttagatgatgatccaactgggactcaaacagttcatgatatagaagttttaactgaatggcctgttgaagcccttgttgaacagttcctcaagctaccaacttgcttttttattttgacaaactctcgttccatgactgctgataaggccatgctgctagtacaaactatctgtaaaaatcttaaagctgcggcagagaaggtccctggtgttagttatacaatagtcttgagaggtgattcaactctacgtggtcatttcccagaggaagctgacgctgctgtctccgtattaggtgagatggatgcttggataatctgtccattttttcttcaaggtgggagatacactattaacgacatccactacgtcgcagactctgatagattaattcctgctggtgaaaccgaatttgccaaggatgcagtttttggctataaatcttccaatctcagacagtgggttgaagagaagaccaaaggacgggttttggagaaccaagtttcaacaatttccataactctcttgcgtaaacaaggaccaactgctgtttgtgagcatctctgtagcttggagaagggctctgtgtgcatcgtcaatgctgctagtgacagggacatggctgtctttgcttctggaatgatccaggctgaattgaaaggaaagcgatttctctgccgcacagctgcaagttttgtgagcgcaaggattgggatcaagccaaagccacctatctgtccaaatgaccttggcttaaaaagagctttaactggaggcctcataattgttggttcatatgtgccaaaaactacaaagcaggttgatgagttgcgatcacagttcgggcaatctcttcgagtcatagaggtgtctgtcgagatggtttcaatgaaatcaatggaggacagagaccaagaaatcagacgaattgttgaactagggaatgcttatatacaatccagaaaagacactctaattctcaccagccgccaactcattactggaaaaactcctgaagaaagcttagaaattaattataaagtgagttcagcactagtggagattgtgagaaggattgatagtaaacctcattatatcattgcaaagggaggaatcacttcatctgatattgctacaaaggcgctggaagctaaacgtgccaaagtcatgggacaagcattagctggtgtacccttgtggcagcttggtcctgagagtagatttcctggggtcccttacattgtttttcctggtaatgttggtgataacagtgctcttgctaaagtggtgaaaagttgggcttccccatctagaagttctacaaaagaaattcttcttaatgcggagaagggcggttatgctgttggtgctttcaatgtgtataaccttgagggaattgaagctgttgttgcagcagcagaggctgaaaagagtcctgctattcttcagattcatccgagtgctctaaagcaaggtggagtcccactggtagcatgttgcattgctgctgcagaacaatccagtgtgcctatcagtgtccactatgaccacggcatttccaagtcagacttgcttcaagctcttgaagcgggatttgattcagtcatggtggatggttctcatctaactttaggggataacatcttatacacaaagagcatatcttccttggctcatgcaaaaggtttacttgtggaagctgagttgggtaggctctcaggctctgaagatggcatgaccgttgaagaatatgaagcaagatttactgatgttgcccaggctgaggaatttattgatgagacaagcattgatgctctagcagtttgcattggaaatgttcatggaaaatatccacctagtggaccaaaccttaaattcgacttgctaaaggaccttcgtgcattaacattaaagaaaggagttagcttggtcctccatggagcatctggtctatctcatgagctcgtaaaggagtgcatagacttgggcgtgagaaaattcaatgtgaacaccgaggttcggaacagctacctggcgtccctcagaaagccagaaaaggacttgattcaggtgatggcgtctgctaaagaggcaatgaaagctgttgtagcagagaagctgcgcctgtttggatcatgtgggaaagcctgagcgaagtacttgcgttgcgccggcaacatgcagtacaagaccgactgcatcatcgggttcgtgatgctgctgctactgtgcagttgcttacagttacagctcattgcgttgaacagctgaagtggttattgtactttgcagtgtagcgcaactaaggctaattcataaatcgtaataatgtatgtatgctgccccgctgtaaaaatgctccgtcgttaataaatgccatcgcgcttgctgtgccttttgtttacaaaaaaaaaaaaaaaaaaaaaagagaggcacacaaaaaccaacgaactacacctataagaaatctcgtgcgccggccccgttcanttagctcccgcttccccccttgcgggggg

SEQ ID NO: 5128 - DNA, 1234 bp, Zea mays
aggaaggagcgagtttctacaacttctcacgttcctactgttgttgggagggttcggagtccagatcagagatctgcgacaactacgttgtcaacactcagcaccgtttggaaggcttcaaggctggagccagagggaccgtgccaaacgggcctctgctccagctaaccgcctgcctgccttttcttctctcgtccaccctaggtctcagtctctgctcgcgctcttgtggagctactaggtgaccgtcgcggccgccctacgccacgtgctcgatccagcctcgtcggcttcttcgcacccgtcaccggcggtcagcacccaccaggttcatagatggcagagacggtgttcaccccctctttggaagggatgaagcatgtgaaggcagagaacggagtcattctcaccaagcccttccttgatgtctgcaagcaaatcttgcctgtcctggataaatttggagctgctatggcaattgtaaagaatgatatcagcggcaatatcacaaggctggaaaacaagtattcttcagatccatcaaagtatggacacttgtacagcatggttcaggaagaagttcaaaacaagaccgcgaaaggttcctcaagctgcacaaatggtcttctgtggctcacgagggccatggatttccttgttgagttgttccgtaacctgcttgagcatccagactggaccatgactcaagcttgcactgattcatacaccaagaccctgaagaaatttcatggctggcttgccagttctagttttacggtggccatgaagctctctcctaatagagataaattcatggaggtcattagtggaactggtgatatcaatgcagatatggagaaattttgcacaaccttctctccttttctcaaagaaaatcacgagtttctggcgagcgttggtcttgatgatatgaaggcttcgtagagcgatctccaaggtggtgattacaacaaaataagcgtgtcttatcaaactcaagtgttgcagaggatatacctgttttctgtagccatctccccattgaaaattatacagggtgataataatttttccgcatgattaaccatggctacttacacagtgacttgacagtactctacaaatttactttccaaagttagtccctttttttcccagataatctacatatgatatgaaattctagtgcaattaataaataaattcctgcaaaaaacagaaccgttaccggcga

SEQ ID NO: 5129 - DNA, 5166 bp, Zea mays
caatgcattgaagctttttaggtcaagttagtgagttgaactaaattattcattattaaaacctttaggtgaatgtatttattcatttcactaaattttccatgctattcttttctctgccttgggcagaacattaaagatcgctactatggagttaatgatccagttgcactgaaacttttgagcaaggcaggtgagatgccatccctgacaccaccagatgatgagactataaggaccctctacattggcggactcgatagcagaataaccgagcaggatttgagggatcagttttatgcccatggtgagatcgagtccataaggatggtacttcaacgtgcaatcgcatttgtgacgtatactacaagagaaggcgcagagaaggctgcagaagagcttgctaataagctagtcatcaagggcgtgcgcctgaagctgatgtggggcaagcctcaggccccaaagcctgaggaggatgagtctgggaggctggggcaggtttcccacggagggctgctccctagggctgtcatatctcagcagcagagcggtgaccagcctcagccccccgggatggagggccaacagcaacaggctgcaccagcatcgtactacttcaacattccagcaccaccagcaacggagcggactgtgtatccatccatggatccacagaggatgggtgctatagtaaaaccacatgacagtgaaggcaaaccagggccgcagcaagccgggcaagctcaggcatcaagcaacccagcacaagggggcggctatcctgcaccaccgccatactaccatggtcagtatccaccatactatccacccccaccaccatacggtggctacatgcctccaccgcgcatgccctacccaccgcaatatccgccttaccagccgatgctagctcaaccagcacaggcacaggctagttcatctcggcaaccaccgcatgcaggtggagggcagcagcagccgcctgatggccctccagctcagcagcagccacagcagccaattcagaactgaagtcctgtcaagatgttgggtattggtactgctctaactgctcggcaggagaatgcaacccccgtgggtcaccagctttcgtaatttcttaatttgtggttaacagtaaaaactttgttgtattgcttatcaacgtttgaagaaaaaccgtgagatataccggatgtatccagcttctggattttgtggtacctgctgagtttcatcaaaaaaaaaaaaaaaacctaacgactagtaaaaatactgacgcaagctcataattgacgcctgcaacggctaaatgttaattctttatgatatagccaatccatctgatgagagcacaacttcaatgctgattgcttttgttttctgttctatctttgggattctctctccttttttttttaaaaaaaagaggttccttacgaatggtgtgatatgctagacgtacgatcagcaaagccacttggcgtctctctaacgaccaaactccagcaggccgcggccaacgctcctctccatggtcaaaaacgcagtgctcaccgtctccacgccggccaccgacggctctctggcagcgagcaacaagctctccatctccatctcgtcggggtcccgctgcacccacgggtgccggctcactaatttactcagcctgccgagcctctcagcggcgtccctcatcgccggccggttctctccagccatctccaggcactgcctcgcgaggtccgcgacttcctccagcaccccaacgacgttgtcctcgcccttgacgcggtcgtctaccacgtccatgagcctcccctccttgagcgcgcacaggaagctcacggagaggctcctctcgctctcgggcccgtcgaggttgagcgccgtcctgccggtgaccagctccaggagcacgacgccgaagctgtacacgtcgctcttgtccgtgagctggcacgtctgcatgtactcggggtccaggtagccgcaggtcccctgcaccagagtcacgaactgggcttcgtcggccggcgccaccaccgaggccccgaagtccgacaccttcgcggcgtaccggtcgtcgaggagtatgttggaggacttgacgtcgccgtggaggatcggcggcgacgcgcacgagtgcaggtagtccaacgccagcgcggactggtgggcgatcttcagccgagtggagagcggggcgtcgcagcggccaccgtggatgaaatggaacagcgtgccgttgggaacgaactcgtagaccagcatgggcacctccacctcgaggcagcaccccaggagcttgacgatgttcttgtggttgacctgggacaggatgagcatctccctgccgaactccttccggcctgcgccgctcgtccgtcgtcgtcgatacgcaccgcttgatcgccaccacagtgccgtccttgagcgcgcctcggtacacggtcccatggccgccacgcccgagaacgttctcgtcgccgaatcggcccgtcgcctccatgagctccgcctccgtgaagattgtgaacgcttgccccgcgcccgcgctgctgcctatctgctccagaagcagcaggcccccgtgctgacggaagtatctctgcttgatgtcggccagcttcttcctctcgcggatcaaatacgagcaggtgacggctatggccactatgaccacaccgacgcttatgcctgaatatatatattttttttctctccacatgttaactttactggtacagtttaacagtctacacgagaaggtaaaacaaaaagaggccactgtatgtaattgtgattatttaccaatagatagcatcgccgtggcagactgtgacaagccgcgacgcctgcagtagaaaccacctcgcgtgttgatgcaaggcccagctgggcatggagatggagtacggccacactcatcgatgtctgcaaaatgaccacacggtaagaacacgatctcagaaaccggcagtccaaaaacacagaatgacagcttctctgggtgtacgtttgacggaccttggcatccatcaacaaggtaaggattgcccctgtagccttgagagcagttgcaaaggtacccaagaccagtggccgaaccaacgcacacgctgtcgctgctacggcaggcgtaggaggccgcatcctgcctggcgacgtcgcaggttgtgttgcccacggcccagttcaggatagtcgggacatggccgtcgcgctcgtcccagaaggtcgtcgagttcaggtacgccgcgtggaacttgaacctgccagcctccaccaccatggcgtatctgcagcgctgtcgtgtgtcgtcgtcatcgtcaatagtggcgcttgtcgtactgttcttgtcgtccgacgtgtcgccctccttcacggagatgtcgtggtaggacagcttgctgctgagcgcaacctggcagcagccaacgccggtgcacccgtcctgcgctgccggcgtgagggtttcaggagcagcgctctgcgtcagacacccgatcacgtactgcattgtatgggcaggagagaagaatacacttgagtcaccgacaccattatcatattaaaaaataaataatctgggagaggagtagaggactttacgatggcagattgccttgaaccagccatgaggccgatcgcgtcgactccgatgacggtgaacatgttctccttctccgccaacgtgaacggcgtgccggagaggttcaggaggtacgtggtcgagcggttgttggggcacatggaggcgacggagctcatcacccggacctggccatggagcagcagtatgtcggccagtaccggcaggtcgccgtcagagaagtacgcggtgctgcttcggcggccgtcctgagactgagactcgttgcagtgaagctcaaaccccttctccatcgcgcagccagggccgatcccgaacgggtactcgatgctcacgtcgccacacttgctcgggcagtcatggcggggcgaggacgagcacgaggacggagcaggctcggacgaccttaggctgcagcggaagagcaaggctgaggaagaagagcagcatcttgacttttggcagagatttgctcgatcggcgtacacgtttctgtgttccgtgcatgtgcgcacatctatctatgcctctatactatatatatatacacacatttgagttgaatcggtagatttctggtgacgaattcgccatccctgagcgacttggccaagcaacgtgatgtgatgagctcgtcgtcgtctctgaacgcgacttggccaaacacgcgctatgcttctgttgctgcttcctccatttcacatatggctgttcgtagcggactgaaaaacccgtgctgtattgttttgagttgagaagatgtgagttctgacgacattgacgtctcagctaattaactctccagtgggaaatgacaattcgatcgatggcatggaggaaataaaactattgcaactagcaacacaagtagagaagcagagagacgaggcaattcgatgcatgcatggaggaaataaaactgtgcatttgactggatctaatctaacaagagaggccggcatttctttagcacgacgaggagtcaaaattacgccccctgctgaatgcacggaaggtccttggggatagtttcttaattgcagcgcacatgactggaatcccgcctctgtccgatagattgtacatgtaaaacaagaacagcacgcgttttgatcgagagccagcgcttcaatcgctatgtcgtgccatatcaacctatcaggtttgtattatctatcaattctagactttatctgccacaacgctctagtgcatagtctttaccatcagcatatagtcacatcagcatcatatcaacttttgacttttagttaacacaaaacacaatattttttgaaattaaaaacatctggttacattattaaacaaataaaatttacagagtttataaaagttacataagttaaaaaaataaaaaagtggtttataaataaaatctaattgctatggtgcagattctacatatgatccattaaatcattttggagttgatcatatactatactagctagcatagcatagattatggtctcatcttgaaggatgactgcaaagctcgtgggtgctttggaagtgatggttggtgc

SEQ ID NO: 5130 - DNA, 4368 bp, Zea mays
cggccgagccaggtgaacgatctctccagtccggtccccccctggcccctaccccaaccctaccggctggttcgtcgcgcgcgccgaatcgtggagaggcgggaatctgacgcggacctcattggattccgtgcaggtttgctcgggtcttcgtgccagcgttgatggaggttccaaggtgacgtcgctatccggacggcgatgctgctggccgttggcaggtagttggacgcacagctggacgttccgatcaggagcgggaaggttgccgtcaccgtcagtgctgctgctccccaatagccgccgtagctgctccgttgcccttttgtttacgcagtagccaacagcaacagcaggcgccgtacctgtacgacggtgcgccggcatggcaccggctcgctcggacggtggtggcctgcacggtgcacgctggtggtggtcccggggggccccgggcgctataaaacgaggcagccggtaggagtccacggaatcgaaaacccaccgcaccctttcatcagcctgcctgtccactgttggcttggtgacttcctccgctccgctccgctcccctccgctcccgaacggtcgatctttgcatggcagcagcagctggctccaaggggcgggcgatcgctggaagcttcgtcagccgcgtcctcgccggcaaggccgcctcgccgaggtactcagacgggccacactcacccacacgcgcgggtttcggtttgccctgtgattctgttttttttttactatttttgagcgtgcttgttctcgatcagttcgtccaagatctcgccgtagttttaggcttgtagcagagcgatctgtctgttctttttacggccgttcttagctttgctctgggagtctgggtccggtgatccggtccctcggatcgatagtgcttattccccccccctccgacttgggacttgttgggaggatcttaccttcgtggataactataactctagttctgcagagagcccttgtttcgtgttggttcagtgtgctgctggtgccaagattttggtcagcagaaatatctagaagttggcgacaacagaatgattatcttctcacacgagtatgtagatatggcaaccctgaacatctcccagcttgtttaatcctctggccgtccgtccgagaacaatagaacacatactaggagtctaggactaggagggagagtatgtatcttcaacttgaatgcacactaccatctccgtataagtgatagaagaactccatccatctccgtagaagtgatagaagaaccccaaccaaagccagatccatgtgcttgtactacactagtaccacggagtccttctctccctcctccgtagatattactgtatttgttgttctacggttctgcccacttcagactgtcaaatctgcaaaactgtctgtcagcctctgccactaggaaaactggaaaagccaaacgccacgccacgccactagcaggctgcaggcgcacccacacaaagaagatgaggagcagtggaggcgcgcaggacgtgcacatcaagccgcgcagcaaacagcaagcgacctcgcctgattgccttccgtgttccatcgcatcgctttccgaaaggcggattgatgggtgggtctggtgcgcggtagttgtcgctcggctccaccctcaccctcaccagtgggcagtgcagtggccagtcactcactcctacccacctgccgatcttggctgccatggctcgcttgctttggttctcactcaaaggaaagaaaggaaccctctccacggtacgaccgggaccagaagcatccgcgtctgccgggccccacctaccgtcctttggcatccggtccgtacgattctgtttcgatcccatcgcgccagctgctgcgggacgccgggccgacgaccgatcggggccgtccgtccgtccgtggggtctcgcagtaggtgacatgcccatcggacggtgtttggtgtggacgtgtggtggatggtacatagtaccgggcgtggtacggtttgctgtggtgagtgagtgagtgggatcatggagggccacctggcctcgcctcgctcttgtacgaagtcatgcgcgcccgcccatggcccattcggcccatgtgcgcgcgcagcccagccgtgcgtgggagtccgatcgtgatgcgtttgctagctctgatgccatggcgccattgtttcagcctaggtgttgggatttttcatcttgtcatgaacgcgatgaacctagcgatcgtctgcacagcttcgtcagccgcgtcctcgccggcaaggccgcctcgccgaggagggccgtgcacgcctcggcgtacgacaagaacctggaggaccaggtgcgcccggcgttcgtgccggacgatgtgatcggcagcgccgggagccccgacaagtactggagcccccaccccaagaccggcgtcttcggcccggcggcggtggaccccaagctggccgctggtggcgcgccggacgccggcgcggatgctgcaggaggcacggtgctggaccagaaggtgtggttccgcccgctcgaggacgtcgagaagccgccccccgccgcgtgagccgcgcggcgctgctaggccagcccacactgctgctcgctcataaaaagggcggcgggagagcctggcagtggcaggcaccctgctcgtgctcggccgggctgggctccctgcttatatcactgcaatattatactactagtagtggtgcttgatagcagtgtgtggctgtgctaataccagtataatactggttctactataatacagtcgtatcaggcatggcgtgcatcaggactggttgtgatagtagcaacgtgatgctcgtgcctgtaataagaacaagcaggcgatgtgtgcctgtgatgtaccggtgtcgtcagtgttataagtacttgggtcaatggtttctgcaaaaaaaaaaaaaaaaattgcccgtgaaagctagagctcaaactctggtcattacaagccgagcacaccacaccacccaaatagcccttgaaacctcctacacatgcatggtaaacatcatacacaatcaccctaagaaaaccattatcatttaaagagcatatgttctatctatcgatattcatgcagatcgtacgccgtgacggcagatcttctgcgagaacactcgcttcgctaacacaacctttgatgttcacgcagaccatttgcatgaacctcggaccgaccgaagtattcattctagagagcctgagagcactgtctcaaattattgcatagtttggaaactcaaaggattgaaactacgtcaatttcgaagtggatttgagttttcaaattgaccccaatcaacaaattttgctccctactatctccagtttctaaggagatttgagtttccaaattagcccataaagatcttcacacactgtcatgtgggctagagagggtacatctgttgccaggcaacaccagagccaggcaacaagctcaacagtgaaacttctgaactccgaaacgtaataaactccgtcctcctcgtcctcgatccgtctcctcagctttcccataaccctgatcaagctctagccaattttgtttgtttcggacaccttctttcgttggccgatcgagctggagatgcgttatgcgtgtcgcattcagaatcaggaccgtgtggttcagtataaaatagaaatgtcatgtgtcagattgactccgaaccccgtatgctgccagtatgatcgatggctaaccatgcacgcttgccgcgtgactgtgactgaagcggaccgaactctgcaggcaggggcgcattacgaacgtacgccctgtgtgccagcctgatcgagctcgccgattggcctacccttaggaattattgtgtctgacagcgaggttttcgctgccgcccaaacggagaggattcattctacaattccttggttttcaaacttgacatcatggtttactacacatacgacgtgatagtgatacgacacttgcatgatgcatcatgtgcacacgtactggcagctcttatcaattgtatcatcgctgtaggagcacgcttgttattagttagtttacagacgacgcacctgtcgtgtcctgatagggtgtcgttattatcatatcgtctttgcatatacaaacagaagctgtacgttggggctgttctatcgtcgcatcgtctttccatgaatatttttttctttctgattcttggttagctgtctttcatttcgtgggacaggaacacgctgatgcgcgttctgctggtacgcctacggtgtcggcttgcgactgcgcgcgtgcgatatacagctgtgtgtcccggccgatcagagattttttttagataatggg

SEQ ID NO: 5131 - DNA, 1723 bp, Zea mays
ggcaaaaccaacagaacaggcctatgttcccatcgagtcgagtcgagacgagaccgtcctccgcccgagtctcgctcgctagctagggtttccaccaatggcggcgcccaccacctcccgccgcggccccggcggcgcgcgcaacatggacgacgagaacctaaccttcgagacctccccgggggtcgaggtcgtcagcagcttcgaccagatgggcatcaaggacgacctcctccgcggcatctacggctacggtttcgagaagccctccgccatccagcagcgcgccgtgctccccatcatcaacggccgcgacgtcatcgcgcaggcccagtccggtaccggcaagacgtccatgatctccctcaccgtctgccagatcgtcgacaccgccgtgcgcgaggtgcaggctttgattctctcgcctactagggagcttgcttcccaaacagagagagttatgctggctattggggaccacctcaacgtccaagtgcacgcttgcattggtggaaagagtattggtgaggacatcaggaggctcgagaatggggtgcatgtcgtctctggaactccaggcagagtctgtgatatgatcaagaggaggacactgcggaccagagccatcaagcttctagttctggatgaagctgatgagatgttgagtagaggctttaaggatcagatttacgatgtctacagatatctccctccagaacttcaggtggttttgatctctgcaactcttcctcatgagatcttggagatgactagtaagttcatgaccgaaccggttaggatccttgtgaagcgtgatgagctgaccctggagggcatcaaacaattctttgttgctgttgagaaagaggagtggaagtttgatacactttgtgatctttatgatacactcaccatcacccaagctgttattttctgcaatactaagagaaaggtggattggctcactgaaaaaatgcgtacaaataacttcaccgtatcagctatgcacggtgacatgccccaacaagaaagggatgccattatgggtgagttcaggtctggcgcaactcgtgtgctaataactacagatgtttgggctcgaggactggacgttcagcaggtttcacttgtcataaattatgatctcccaaataatcgtgagctttacatccatcgcattggtcgttctggtcgttttgggcgcaagggtgtggcgatcaatttcgtgcgcaaggatgacatccgtatactgagagatatagagcagtactacagcacacaaattgacgagatgccaatgaatgttgctgatcttatttgagcagcaagaggatcgggaggggagcttcttgtgttggcttgaggcccttggcgcaagtgtggctgtggactggagcagatgggctttgtagttgggggtggagcagagattatttccgtttttgccatggcatgaactgtatatattttagctcgctccagctcatgtaacactttgttgctgcgtttgtgcttgggacacgaagacctgtgttgatggcttcgttagtgtgacactgatttggcgtcggatttttgtttgtcatctgtcattcctgtgctgatctgaattgctgtttgtttattattattattattacaattactatcaattattatggttgactggtattacaattactatcgtgcattatggtttaaaaaaaaaaaaaaaaagggcggc

SEQ ID NO: 5132 - DNA, 6252 bp, Zea mays
  misc_feature (624)..(624): n is a, c, g, or t
  misc_feature (698)..(698): n is a, c, g, or t
actcgtgctccaggcatgccaccttcctctggccctacccccacccatctacccagctctggtctcttcgctcgccccctcttgccagcctcctccctcacccttttggtctctccctcagtcccttttctctcacaaaatattaatttactcatgtcctacatcgttctctggtggccgatagcagctctctccactgccttagctatctccagtagcttaccatcatctcttattttaagctccactatgaaaacagtacaatttataatgcaaaacaatattttacatagccatatgtacaatctgttgttcataaggtaagataatatccctcataaattgttatttcaatatttattttcaagtaaatgattggctagtgagttagaacctgtaggtatattcgatttaatgaaataggtagattagttagtgagttagtcaaactagattagtattgctagatagattgcttatttttagttaggttagattagtattgttagttataccaatgaaatcatctaggactctagtagttttagtgattaatagcgagataaaattattatggttaacatgtgttttgtagagataattaacgtaaggtcataatgatgntaattgtttaggaaatcgttggttttcatgtccctaagtatatggtattcattttgattttcaaatgatggacnatagggttaaggatgaactagttctaagtgtcaattgaagttgagggacacttagagtattttaggactttaactttttctttcaacatactatacaagaggatattaactagtagcttgaactaggtaagacccaaataagtttggatcaagacacatttacattttttcgaaagttggatatgttacaagggtttttgagttgttcttgtgtgatcttgtactcatgctcttgactttgcttctcgtgtgtgtgttgatgcattgtgcttttgtgtgtatattctttctccctccctactataagtgttgattgagatcattgtataaggatgtgagagactccaaatctatgtagattcctcacaaacgggattgtaatataaggaaaaactgtggtactgaagtttgatctttggatcacttaagaggggttgagtgtaaccctcatccattaggaagccacaacatggagtaggcaaacatattacgcttgaccgaaccacagtataaaaatcatcgtgtcacttgtgtcattgacttttttgctatttttctatcttcatagtttctttattctcacttgtgatattgatctaagtctaatttataccttgacagagcaatcaagtgaaaggaaccgctctctctttctatcctctcaaacttggtttaatttgcactaactctaacttttagaccaagtttatgtgttttaagtcatatttttttacctttaactaaacacatatataatgctaacacttacgatatattattaggattataagatgaatcgtcgaatgcatttttcttataataaaagtgtctaaaaatatttggtaaaatcatttataaacctagttaaattaagaaagtttgaccagcatgttcacttattgtaagagctaggtaggagtaccgcgtagctgcactgcaggccggcagcatactttaagcgaaaggtgccatctgcattccggacttccgaagtccacagtaggtatccctaaagtgcgtttgcctttgcaggaaacgaaagcatgagcggatccaaccttgaccaaatgaaaagtcgcatgcatgcgccctggacatggtcgtggcaccactgcaacctccaaaccagctctttgcggcagaaaagaaaaatcgaagcgcatgggtcgtagagctcagggcaatcaccaaatggcaggcaactccagagacgaaaatgatcgagcggacggatgcccaacccacctgaacgcaaatttctgatcagagcgataggaacttggcgtagggatgatgggatcgtggtggttggtccctgccgatgtgttgttcccacctgccgttcctaaccggcggctcactgcactggacaggccttctgaaaggcccggccggattcgccaggttgccagcctaccgtaccgccacgccgaaacgcgcgcagacctctgcactccgcacagctggggtccgaagagcgatgcttttttctcatgttgttcagagtttcagcgttcgcctccaattgtcaacttgctggggcacaaaagctagcaccatctctgctctgacgtttgattttcttgtaaataaattcagtccaagcgcatttcagagccgatctcaactttcaaagaaactgccttcctctgatttgtttttttatggatggatggtacatgcaaacggttcgttttcatgactactgatcgatctgttgcaagcatgaagcataactctagcttaattccaggcttcaccatttcacagttctccgagaattaaaaggtttcgctgttttctaaaacaaaaagagagagaaaataaaaatgaaagccggaaacgtggcacctagaattggactgagcgatcggatccggtgccatcatcgtctgtgtcaaaagattgtttccgaagatttgttggaacaaatatttgacactcgctgcattataggttaccaaatccacctcctccctcgcatcaaaaagtcagtacaaaatgacttcaacgcattagctaggtttattattatgcttgccaacgattcgtcataggcaggggaaggggaaaaaagagctagcacgcggtacgtacgtacgtacgtctaaaacgtcatggatttgacgctctaatcattgggttcggaagcccgagttcctttgcccgcaagtttcagcaagccgcagaaatatgttacgccgtatgtaggcagcatatgatagcggcagaataactaactaatcgaccggccagaggaagcgaaggagacgatgggcagatgggcaacaaacactccggccctcgtgacctctcttctctactacggcctgaaagccaagatgcgtagcaggatgcgcaagtgcaaattaatccctatcccagcgttagacttagaacgccgcgcgcagtgagtagaccatatacacacatggttgcaatgcaaataatgctggtgctttcgctgttttacacagaccgccgaaatgctcttgtggttgtcagaaagagatctgaaactcgacgcaaaatataatgaaaataaccgaacgacgtgacagcgtacgtaagcagagtgtaaaaacccaggcgttgttgtctggttgcagagaagcgtgtaggggagggaactgccccgttctgtgaaaatcgcggctccaaagtgggcaggccagtgggtgcaccaaaccacctgcacagtttgaatgatccgataccacgcgctgcgcgatgacatgatcgatcggtcagctcggagccgcacgcagcagtcactcgcacgaaccgcagcagcctccagctggtaatatttcccccatgctggaattcaaaaggctccaaacctaatcgaccaaccacaccccccccgcccgcggcgggaacggcacgaggcaaagccaacgctagctatatattccgtgcgcgccccgtggcgaagcctctcatcgcaaactcggaaaccttgagaggaaagccaccagcagcaagcgaagaccaccagcagcagcgcagcggcgacgtgtttcgctctcgccatggcgtcgtcgtcctcgtcccggctgctgctcctcctcctcccgtgcctcgcgctcacgctgctcggcgcggcagacgccgaagtgcaccaccacgagttcgttgtacgtgcggcgcacgcggcgtgaataatacgtacatgcatggtagacgtgtttttttccagcgcgcggctggaaataacgattctttttctttgcctgatcggtcggtgtgtgctgtgctgtgtttgtttgctctgggggtttgcgcatggtgctgctcatcgtcaagatccaagagacgccggtgaagaggctgtgcaagacgcacaacatcatcacggtgaacgggcagtacccggggccgacgctggaggtcagggagggtgacacgctcgtcatcaacgtcgtcaaccgggcgcagtacaacgccaccatccactggtacgtacgtcgttgaagctcgtttttctcaaccgtgagtgacatgacatgacatgacatcgatcgtctggtctgtctatactctctcccgttcatggccggctgtctcgatcaatgcgcgctgcatgcatggcgtgtgcaggcacggcatccgccagataaggactgggtgggcggacgggccggagttcgtgacgcagtgccccatcaggcccggcggcagctacaagtaccggttcaccatccaggggcaggagggcacgctgtggtggcacgcgcacagctcctggctcagggccaccgtctacggcgcgctcatcatccgccccagggagaacaagacctacccattcgccaagccctcgcgagaagtccccgtcatcctcggtctgcaccctgctcatcctggcccgttaatttgttgtttcattcacgtctctaataatctaacggacggtgatcgatgggcaggtgagtggtgggatgcgaacccgatcgacgtcatccgggaggcgcagaggaccggcggcggtcccaacgtctccgacgcgttcaccatcaacggccagcccggcgacctgtacaaatgctccaacaaaggtagctagctcatctcgcatacgatgccgcccatgcaaaataaacctgaacgaaacagagcatgctcacgatcgcccgtcggcatgcactgcagagactacggccatcccggtgaaggccggcgagacggcgctgctgcggttcatcaacgccgcgctcaaccacgagctgttcgtcaccatcgcgcagcacaagatgacggtcgtcgccaccgacgcgtcctacaccaagcccttcaccacctcggtgctcatgctcgcgccgggccagaccaccgacgtcctcgtcaccatggaccagccgcccacccgctactacgtcgccgcgcgcgcctacgtctccggccagaacgtggccttcgacaacaccaccaccacggccgtcctcgagtacgactgcggctgcgcctccgacttcggccccaagatacagccggcgttcccggcggcgctaccggccttcaacgacacgtccgccgccaccgccttcgccgccgggatcaggagccccgaccgggtcaaggtccacgagaacgtcgacgagtacctcttcttcaccgtcggcctcggcctcttcaactgcaagccgggccagctctgcgccgggcccaacaacaacacccgcttcgcggccagcatgaacaacgtctccttcgtcttcccgcagaccgactccctcctccacgcgcactactacaagatccccggcgtcttcaccaccgacttcccggcatacccgcccgtgcagttcgactacacggggcagaacgtcagccaggccctgtggcagccggtccccgccaccaagctgtacccgctcaggttcggctccgtggtgcagctcgtcctgcaggacaccagcatcgtcacgcccgagaaccaccccatccacatccacggctacgatttcttcatcctcgccgagggcttcggcaacttcgaccccaagaaggacgtcgagaagttcaactacgtcgacccgccccagaggaacaccgtggcggtgcctgtcaacggttgggcggtcatccagttcgtcgccgacaacccaggtgtgtggctcatgcattgccatctggacgtgcacatcacctggggcctggcaatggctttcctagtggaggacggctatggcgaactgcagtcgctggagccgcccccagttgatcttcccatgtgctagtggaggacggatatttgtgttgaggaagaaagcctggtcacgttgtatgttaattgttactcttttttggtggaggggggcgtgttcgtgatcttaaattcttaggggacttaattttccagcttgttggtttgaagtttcttctgtaaatctatgtaattttcaatgacattcagcatattatttgagaataaattatttctttgtacaaacaattaacgaaactaccggcctcagatgtgcaacatcatatttgaacactaagaaaaattcagctttgatacctcagggaaacattatcgtgtcctaac

SEQ ID NO: 5133 - DNA, 1560 bp, Zea mays
gaaaccttcgcgcggtgatggagcacgcgcacgcgacctcgacacgcacgcagcagccagcaggtgaccgccgtcacgcgaccgcttcccacactcccttccccaccagccgaaaccgaggctgacgctgcgcgagccaaccggcggtgatgcaggcggcagtcggccaccgcggcgccaaccttggctccccgtcactctcgcgcttccggtatggcttccgcctccccggccggtcccgcctcttctctgagggcgtggcggtggcgccactccgcgtcggctctctgccccagccacggacccatggcagcggcggtttcgcgcacctcggggccatggatggggaggcgccgaggctgccgcacgccctcaggagaatgcttatcgatcatcagaaaatggcatgtcccaaccttctgaaagctgctgtactttcaaccatgacattgcttgctgtacctcttgaggcgtcagcggagatgtgccagccacctagttctttcgccaatatgccaatttttattgttgtagctctaataggagctgctgttggcggattattagcacgccaaagaaaggcggaattgaagcggctcaataatcaacttcgccagatcaatgcagcacttagaaggcaggcacagattgagtcatttgcgcctggccttacttatgcgccagttgggagaacaaatgaaactgatgttattgttgacccaaggaagcagcagttggtcacaaacctgagaaatgggaagaattacatgaggaatcaagatcttgataaggctatagtggagttcagaacagctctggagcttgcagagagcataggtgatcgttttgaagaaaagaaagctgcccgaggactaggcgcatcgctgcagaggctcgggaagtaccgagaagcaatgagacagtacagcaaggttctggagctgtccaaggagacaggtgaagattccggctgcaccgaggcctacggtgccatagcggactgctacaccgagctgggcgacctggagcgagcggcgaaggtgtatgacaagtacatatcgaggctgcagcccggcgagtaaggtagatttctttacagacgagacagcgagttccttcccgttcgttgagttttgcgttttgtcggtcttgttaaactcactgcaggtattggattgttttgagaacggttttaatattcgtatataaataactattgatttaatcaaaaaaataaaaaaaaatcacaacgcactcgcccagctagtctccatccgtgttttacttaaaaagaaaggtgaatcgttgaatgtgaacaccgaaaatgcacgtaccagtccgtttgcggtgtctggtgtgtgtttggttatggaacagttgggacagctacatcatctctcgttcctccatttttgatttcagaggtagagacaacactagaataatcttgtaacctcggaatctaaacaaggggcgccctagagcggcgggacgtattttgggtgagagtcacgactcacgagccgtgcgcgcgcgagagaggggcagaccgttactgca

SEQ ID NO: 5134 - DNA, 2466 bp, Zea mays
ggctaaccaattctacatttgctacacggattttgcatatcacaataatgtttgtcgttccgtatctatgttttatttaaattttgtacttacatcgcaacgcactgacatataactagtaacctatataaatttgttaggtcgacagctggtccgttgctcaactagtctcgaccccgccacccgcggcatggttttttttttttttttgtgtatcaaacgcggtaaacatgcaacgatcgatagatacaggcaataatacatttttttgaaagaaaaaaaaggaggaaaaaggacaagcaacacaaagtcacaaagaaagacgatagatacgtgcatcttcacgcgtggttacgcgcgagatgcgtcgcgcaacggtgccctgcaaccgcgcacagtacccggcacgacgacaacacgcgcgcgctcgcgtctccgtctcacttgccggcggcatcggcggcggcggcggctggcttgtcgccgttctcctcctccttgttctcattcttcttcttcttctcctcctcctccgcttgctcgtcctcgtcagcgaaggcggaggcggggaacgagcggccgatcccgacgttggacttgaagtagatcttgtcgcgcttctccccgtcgaggctcatctcgacgatgggcacccagagcatgacctgcttgctgcgcaccccggtcatgcgcttcatccggccgtcctccacgtacgcggtgacctcggcgtcgtagcgcacccgcgtgcccgtgccgcggaagtagtgctcgtagggggccttctgccgcatccacacgaacccggtctcgcgcacccagccgcactcctccagcccccgcagcggcatcacgccgcccgggaagcccagcgcctggagcatctgcttggagtgcgcgaagcaggcctccgcgcccgtgatgacctccgcgccctcgcgctgcttgttgccgccggccgccgcggtcttcgtggacacggtgagggaagccatcgcgctgctagctagctagcggatcgaagcgggtgatcgattggagggaagggaaggctcgggcttcgctgccttcgagtgtgtttgttttttgcgtggtgcgacccccgcgggtcccaggggtgttttataggggaggacgggaggtacaagatcggagtgagtatagtagtaggtggttgggcgttgagctacaggcactggtcagtcagatcgtgttgggggttgctctgttattagctgaccaacaaagcgcgagacatgacgtttggcgccgaatgggtgcacctaaacgcccaccacatggaagttgccacccgccctgtgtcctgcacgaggacatgcatgctctccggaccctagtgatctgcttgtgacaagagcaactcttgcaaagtcaataactagtccctcaaaagaaaaaaaaatccaataaatatctctactaaagccatcaaatttaagtgaaccctcacatctctcctcggtctgggagtctccttaagagcaagtagaataatatgttgtaaacatactctgaatactgaggtagagaagagaagaggagaaaaaactcaaaaagcgatcgagttataaatttatagctggctttgacataagaaccaataaactttgtgaaagagacaaataagtcatatattaacagtgaaaagttaactactatacagatgtgctaaaagataggctgtaaaaatctttacaattagcaattagctatattattagccttgctttgagtccctcaaattttctattgcggtcgttttcactctgaacgcgcaagaaaccatgtccacccggaccccaggtcctctgctccatcatacacgagcctcttccaccggcatggttccttttggtgacggagcttgtaatttttgacatctagggtcactatctaagttaacccgtatcaaatcatatacatacccatatttttagaaccgaatgataataatacgtcttacataaataatgttcttaataattaaacgacttgataaaacaggacacagtaagaaatagcctaactacaaatgatttcgtctaccgacgttgctcactaggactaaatatgttagacattccaagcaaattatggatatgaactaaatatgttattaattagagagagaaaaataatttagaacaaaaatacgcaccataccacttgcattgatacgaggcaatggaagtacttttttttcaaaaagtaacatccatcaatggtccttaaacatggcatgttgtatcacatcggtccttgaactcttgaaacccgaagaaaaacaggtgctgaaacttggcgggctattcaaaatcgttcaatatagggttttgcttaaatcagacgtcgatattgtgtgccattacttgggtccccgaacttattaaaatgttgtgtcatttgagctccccgaacttgacatgttgtgtcaattggatccca

SEQ ID NO: 5135 - DNA, 1819 bp, Zea mays
cagtgatgctgagactggcatgtctgaggaggacatcctcttacaagatgaaatatgtaaatctcggttaatgagtataaaacgggaggaagaacagtatatgagagagagagcgcggcatgtcgttggaaaaggggaggcttatacgagagatgaagcgtctcagagatgaagatggctcacgctttaacaacttccaaattcttcaccatcgttatgctctgttaaatcttcttggaaagggagggtttagtgaggtttacaaggcttttgatttggtggagtacaagtatgtggcatgcaagcttcatggattgaacgctcaatggagtgaggagaaaaaacagagctacatacgtcatgcgattcgtgaatataacgaattcagcacgacggttcatccaaacattgtcaggctatgggatatatttgagattgatcacaatacattctgcactgtcctagaatattgcagtggcaaggatcttgatgcagtccttaaagctacaccaattcttccagaaaaagaaggaaggatcataattgttcaaatatttcagggcctggtttatctaaacaagaggggccaaaagatcattcactatgatctaaagccgggcaatgttctctttgatgaggttggtgttgcaaaagttaccgactttggcctcagcaagatagtggagaatgatgttgggtctcaggggatggagctcacttctcagggagctggaacctattggtatcttcctccagaatgctttgacctgagcaaaacaccatttatttcatctaaggtggatgtttggtcagctggtgtaatgttttaccagatgctcttcggaaagcgtccttttggtcatgaccagacccaggagagaatacttcgggaagatacgattatcaatgcacggagagtggagttcccttcaaagccagctgtatcaaatgaggcaaaggatctgatacgccggtgcttgacatacaaccaatcagagagaccagatgtactaaccatagctcaagatccttatctctcatacgcaaagagatagccgctatgccggagaacactaaggcaagggtagctgatcatttaatgagattatttatgtatggggatggataatcttgcgaaggagcaaagtgttccacaagctcaagaagaccacaaagggtgtaactgtatatgttgtaaattttagtctttcccatcgcagcaatgacctgaaatccagaagccatcagttcaacggacagcttctttgtagcgtagagaaagcaggcattggtttgaacggggcatgcgtaacgtgatggtttcttggctggtgggctgtgggcagtggtcctgttgatggttggtttttgtttgctcatactgtcggtaaggtctgccaaatcagaaaccaccggtgacaggcgagagctcacatgctcacctccgaaaaaaatctcggccttgcactggcaggatggactggattttgcgtattgccaaaacagatttaaggtagcatgcatcaatacaggttactttggataacctatagactcaccacagccacaagcacagaagctcttcgtacaatttcagagagtaccgatgtgccagatttctgctggtgccaatttgtttgtgatcgctgtcacccttgtacaacactgggatcgctcattgagcatacacaagttatgcaatttgcttttttattatagtcatctttagggcgtcgttttgttcggaacggattctttggaactttaatgttagttttatttgtgttaaaactgaacgtggaatagttccaggttatat

SEQ ID NO: 5136 - DNA, 2286 bp, Zea mays
  misc_feature (180)..(180): n is a, c, g, or t
tgatttttgtaagttcaagaaatatttttacttccactgtgtactgatgcttcattgtgttttttctgatggtggatcccattatccttcagttaacaaggaggacaaagaaactgcaagttactctatcgtgtccaaaactgactcagaaattttgttgcaatctgagactaacgaagncaaaaatggagccatacacttgtatgtcattggcccaatattctttttacagaattccttgctattagtatttgctgttgaattcgtgcttaaacttgtttatgtatatgagcttccctgcaggctggcacttgatttgtcgtctctctcaggcggtgcgcctggacgaacaaggggccttaagattggctcagttaactccttttgacaagggcttatattggcgttttagatgacccaaagcattcttcaaaatgatacagcagaagcactgacttgaattttggatcaattcccatgagctgatatcttcaaaaacatcttagttaggaaaaagaaggaaacgaaaatggaatttatttccatttgttatttgtttgggtgccacaaggaggcaaaatcatagcaaggaattgtaccttatttttttagggattgtgtacttttctgctgttgagaggtatttggtggttggataatgtgatggagcctatctaaatgttctttcatagtggtctgaataacattgagctcattgctggattatgttgtgattctttcaactcttgggtcatgttgcacagaactaactcatagttctgaccaaagagaaatgtttttttatgttaagtacgccctgccgtaagcaagtgtaaactttggggacaaattgcttttcatgtatttgagtttgatatttgaaaatggtacaagtatgttcccaaacgtcactttgcgactatgtttacaagctcggccctcttgccggtctggtcctctcgctggcgtcgccgcaggcgtcacgcgccgcttcatcggacaccgtccagaccggcggagcctccgatgcctctgccggccctagcgcgagttgcgagtgcgctttggcgtggggcagcggtcggagtgcgatggcgatcgcgagcacgcccgccttggctcgaggcagcgatcggacggcgaggacgatggcgcgtcgcatattcacattgtacctacgagagggccttcttgaagaaagggaagacaggtatgctttcacctcaatccctcactgatctgtcattctgtcttctgaattaagacttagctccagattagcagcatttaccggtcaccagttatttcttccctgttacccttttccagatctattttttagtctgaattcaaataaccaatattgccgttcaagttgagaaaatatcgttctctttgtctctaatagctgcatgtgtggacatcattaagacgtgtcacaaacatgatgcacctgtgacctgacacaactagaataagaatgaaacttgagcatcatggttcgaattccattcacatcaactggaaatatatttagctcatcatctgtaaagaagtactggcatgtatttaacatgagactttcaaaagaacggcatacaagaggctgcaggctcactgcaaatcaacattgctcagaagtcaggccggttggtcttggaatagcaaaggggccctggcagcaaagcgaatttagatatgttagggggtgtttggttcctttagtcatactcctaaactttagtaactaaattttagtccccaaaaattctttttgggagaactcatttagtcctaccgtttggtagtttggggattaaaagtgactaaattttagtcaactaaagtttaggaggtgggaaccagatagccccttcatcactattttgatttgcttaggtcagttacggattctgatcagcgtatttatcttgaattcttgtgcaaaatcgacaaccaagagtattttctaaattttactccgtagactataagggtgattcatgcaaccaaagtcaaggcttagctatagattccttttattctagccatgagaaaaccgtggtaaactatgagaaagctgaaaactatttggttgtatcaattatagagcatgacgacatgacaacctagcagaaggcggcacggtccgagaggacaagggggcggtacgccgtgctgtgggaccctatgcccgcagcgctaggcccaagtgtcatgactgtagtcacgcttacccgaacgtgtccatgacgttctacacgagcagtgtgcacgatggtagca

SEQ ID NO: 5137 - DNA, 5035 bp, Zea mays
agtcgatttgaatctactcaagtgtttctttttgacagtaaatgcatattcagatatagattggcagggttgtctagatgttataagatctacaggaggcctttgctgtatttttttattacagtctcatctcttggagtacaagaataatctactatgtcgagatcaagtactaaagtagagtgctagacttcgacgaatgctataacagggatcatgtgggatcaaatcctattgaaggagttagcgattggaagtctaaagacaacacatatgtcgtgtgataatgagagcaaaatcttccaaatcatgtgttctatgcgacaactaaacttataaaggttgattatcatttttttacgagtgaaagggttataaagaagctttagattgattttatataaagtggagatcatattgcagaaagcttcaccaggctcttttggtgcgtcagctagaaattttaagtacaatatcaaattaggaagttataattaaggacggctattaagaactggttttctcgtatgataagttatagatcaattatgtaagaacatgtatcaacttcgaagtccatcccgtaagagattgaaacttatataaaaattaaaaaaacattgaccctttaaaaatatacaatgcttctcgccgtttctaattttttgagccaaactactagttacatatttggctcgctacatctaggagactgggcgcgcatgcactaccaccttcacacacagtagcataaagcttccccacttccaggcgaattgacagcccagccgttccctaccagggaagcattctgcaagtcgcgccattggtagcagataagcctgattccactcgacgccgagcttgcccttccctgacggcgagggcgagctgttattcttcccagctggacgacttctgatcagcctgatgcatgaatacaaacagtagctctcccgtccagactcaccagctgctccacgccttcagcggcaccagcacgcccaacccactcgctgcgactggaaagcaacctccaacccgggcaatcaaagccacaatgtcaggttgtcacttgcaggagatcggagaaaagatttctggaagtcgactccaaactgcatcacgtccacatggttctgtaacactacagggtaccaccagcaaaccatcaatgatacagaccgaaggggaccggaagaaccagactgaaattttggaacacagcaagttcagaaacttcgtatcgcagcttaagccatgaactcatcttcatgacaacagattattgccaggacttttgaaaccaacaacagattatgacaaaaaccttcacggcatcgtttcgtgtttcaaccgtgcgaagagtatgacactttattccttttctacactcgccatttgtacattccatacgacaacatggcgtgaacatggacaaggaacctctatggcgacaacaggatactgggcctactacaacaggctaagggcggtaacctaggcttctgttctgtcacgagctatgcgcttccacctgcaagcagctgctgctgctgcccgagctgcccacgtggcaggagaggtcgcgcacctgcagcttcatgttgcgtgagctgatcgagtccaggacgtccatgcactcctggaggtcggcatcgttcgccaggatcacccactcgtcctcatcgtccttgtatttgagctggaatgctccagccgtcagcttgaacctctttgctatctcttccagcaagtggtaccagccccttgctggcacaaacttgaaccggacggtgtcgccattgtaggtagctttcacggtcagtgcagggctgcttcggtctttgagggcacgtcctgggttccccttgaaagtaggctcgcttgaggcgctgccgctcgaagaatcggtcatgccagaggtggaagggagtgtctgctccttggtgtcatgaccatcgaccatagtgacatctgcttgttgcacaaatggtgagttccttactgttgtttggccttcaatgccatccatgcttgggtggagggaggtcagagaatcgatgttgcctgtttctccagtatgcagagaattaacagcaccaatgggattgggatatgaaggaccatgtgtgccttcagagtttgaatgctgtgtgatatttgcaataccagaaacatagtttcttctgcctttgttgttgtttgccaacgtccgaacttcatcgcctccccttttaggtataccagaaacatgaaattggctagtttctctttgccacccatcaggcgaagagaaatcttgttctgattttgggctacatgtttcctccactgctctcccaagagatgaagtaggcaatgtatcgcaagcagagaatggcatcttttccggaagagaggttgcaggaacaagagacccagtagcaggatcgtactgcaaggatctatccacaccgtgaactgatttaatgaccttctctatcttcttcaatgaacgattgaccttgtttatctttcgagatggccatcgggaaattccatgttgtctgcatattcgtttcaatgtcgttggacaaacaccaaggctcattgcagcatccctcaggctcccagagaagtatttgcgaagaacatccagactaaagttcttttcagatgcactgcgctttttatctgcaactcgcattgagcttctctgtgccttgtcaggttctctgtctccttgtttgtcacccaaagatagatcctggagtgcagattctgtgattggctggtcatcatgtgaggaactttcagagttaccagttggtaaacaagttccactagtcttctcatacattgctgcagtagcactaacattttcaatctctgcctcagagactgttcgcaagcttttgcatattctttgcattgtgctggaaaggttgtttaataacatctgctgctctccacagcccttgcagttgactgggagaaagaattctagtatgtagtcatcgtaactggtgtacgtactcctcagccggatggctacagcagcgtgcagaccaaacttacgagcatggtgtgcaagcgggtagtcttcgatactgtactctcttatatcaggtgagaagaatggcagattggatttaagggctcggcctgcaataccctgccccttctcaagatgacgatcagcacatgcatgaagaaacccctgcatctttgcatcgttaacatagcaagctgattcatggatacgaagtgctgcttttcctggttgcggatctatcccgatattctttccaacacaaaaaccattagcgatgccatttgatgtagggacccatgtaagggccaaaggaagcatgtgtgcatgacaaatagctcttagaacatccaatatctcagtaaaagcagatttctgattttcagagtaaaccttctgattgctgcgatctgttgttgtctgcaagttcacagcctgcaaggcatcgcaaacaatgtccatctctgcatcaaaattaggtttctccttgtttgtgacaagttcaagaactgcacaacaagagcccttgctgggatcgtaaactggcatagcaagtgacccttgtatttcatgaagaagagcatgctccattctcaaatactctggcttactgtaatagataacacttgaggtccactctggcaccccagatatgaagaccctccctggaagccctaggtgcagaccaggctcctccttaactgaaaacaggaaatttctagaaacttctctgtaacctgcaagatcctggtcaagtaaatagggctgctcagatgtactcaacacgacacgaccattgtgctcaacaggcatccagacttgggcaagaacaccatcactcaatgacttcctgaacaaagatagcgccatgagcatcctgtctgcaagagcgttgccaacagacctcggaatgatgctactcccttgctgtgagccattacttggaagaacaagcccatctgactcttttagccctctgtcgactccagttggactcgatgctgctgctgagttgaacctttgagcaagtgacgatgtcccgtccacaggcccaggaaaggtgtcaaacgacatgtcttctctcacagctgaagcacgcggagatgagcccaaggatgaccacatggcaaccatctgttgcgcagcggagggatcattcagcagggagaatatgtgatcagcaactgatgggctgcagagctccgagtatccatcaaagctcgtcatggcagcaacaccaaagggatcatcaaaagattgcatggggctgccgatgttactgttgcagccggcacggttgggaggcgtaggcacatccatggctttgctccactcgtcgaggcaaggatccttatccacacctagtacgccgaaatggatttggagcactgtattgagctacagacaggatataaaggagagcactgtcttctagctgaacagaatctttgtgcaaacacaagaagcaatttgatatcccggcccggccggcgtatctggctatctgcacaggagacaacttttcttatgcagaaatgtcctgttcataacgcaggtagtagacaaaaactccaagacccgtcgatcagcaatgaactccggaacccaaaaggtcaagcctttagaggaaagttcggcaaaggtaattgcttaaagcggcttcacagttcctcaaaattcaactttggcactagaaagactgtacggcaggcaagttcggcgccaacggcgatgaacctgcaagctagaagcctctttcgacaggctgaaattaagcaccaattggatcaaaagaaagccaaattcacaccagcacacacctcccggcccctagaacacagaaactccgagcacagccttgaagactgaaactccggcaccaggcggaaagaacggcgctgggaccaccgctcgccttggccgagccactagaccggctggcagcctccagactctcccaattctcgcctacaaaattattgcaacagcggacgcgtgaaa

SEQ ID NO: 5138 - DNA, 1848 bp, Zea mays
  misc_feature (1830)..(1830): n is a, c, g, or t
  misc_feature (1845)..(1846): n is a, c, g, or t
ggccgctttttttttttttttttagcaaagtcgaccacaaattcacgacaatttcatgtacagacagaaggaactaagttgcaggtaatacaaattttgtcaataaccaatcaaacttaagtcttttttttttttttttgctggaaagaaaacttattttatttcaagtaaacaatgatgcaaattgcaataaatcacatgctctcaagaaaaaacaaggatattcgacgcgttcacagctctacactctaatgaaaactaaacaacccctctggctatgcacacaactttcttcccgatggcactgccccatggccatgaaatgaacacaggcttctacaaatcctttttggatgattgcctgcctatctagagatacactcttgatgcagcatggaaaactggaggaagacactacctacctagcaggcgcgaacctcagtgaaccggcttgaagctggctcacagttgctgttactaagtttgagggagccaaagaggcaggacaatctcctcatgatgggactgcgagtggctacttccaacgacaccgcatctttcctggtaccaatataagtatcatagccctcaagatctgcttctgttacgaggactgcatcggtgcacccagacccagtggggctggctggcctaggtagcataatttgataaagtggtaagccactatcttcgcagtcaaactccatcacgtggtaatcatcatttcctgttgtgttcgtacagccagcttcaatggcttctaggaaacaggccaggtttgtactccgtactggaagttgtccaccggtgagagctccaaatgaattaacagcctgcaaaattgtgtggattgtcatagtgtcttaacgccagtagtattgtactaataacttataaagcaatcacaaaagactgcatacatgccactgcgagggtgccaaaagcactcgaggcctaatggatcgtacatgatccaaagctgcttcaggggtcatgttcctgtatttaatcaagtagcacaatacaatagtggtgcttcgtcctcttccagctttacaatgaacatatgtagtaccgccttgtgatgcattccgatggatgaaatctatggcttgagaaatatcctcgagtgaaggtgcaaagaggtaatctcttgttggaattaccaggtgctcaatctcattagcctggtataaagatgttgggacaagagtttcataaggttcattcaacgttacaaccccttgaactccaagctgcttcaaccgtggaacatcacttgggaaaggaacagcgcccagcaaaataaactggtcgacgcgatcccaccaccggaagtccgcctcgaaccggttgcgcaagacgttgtagagcagcgtcgggtagaacagcaccctcgcgccggcgccgacgagcgcgtgcttcgccttaagccgcacgagctcgccgctcgcctggacctcctcctgctgctcttgctgaaacaccaggcccgcgacgtcgtcaccatctcccgattcgcagatcctcatttcccaccaccgcagcagcagctcgcgaatcctcgcgccgagacgcctccagcgtccgcctccgcttccacaacgagaagatccgtggaggcacggaagagggagggaaatcggtggatcgagacagtggggtagccttgctcgcgaccgtggcctggggacgcgagaaatgggacgagtgatttttgtctaaaaccccagcagcagaaggcggaatggcggaatgcggaaacaggtggcacggattgctgattcgggccggcctcgaggtaccctttgttttcctctttttttgatngtcacctcccggccnngg

SEQ ID NO: 5139 - DNA, 878 bp, Zea mays
cattgggtacctccgggccggccggggctcaatctcctctccttgtccactggcttgggcgtgcctttgcgtgcgacgggagctaggaatccacggcatcggaaaagtggccgcctgaagaaccgatttctccaagatttttttgtccgtcctatcgcttgcaggatcggattcgccgtctctggccatggttctcgccggcctccgccggcacgtcggccagttcttgaccagcagtaatgagcttatggcggcgtcgctctcggccgtgagctgcgcggacgaggtgcagaaggcggagggggcggggtgccgtgacgacgccgcggcgctgcggctcaagaaggtggccatggcggcgatactggtggccggggtgctcggggtggtcctgccgctcgcagggcggaagcggcgcgcgctgcgcacggacagcgccgcgttcctggcggccaaggcgttcgccgccggggtcatcctggccacggggttcgtccacatgcttcacgacgccgagcacgcgctgtccagcccgtgcctccccgccgcgccgtggcgacggttcccagtccccgggttcgtcgccatggccgctgcgctagccacgctggtgctcgacttccttgccaccaggttctacgaggccaagcatcgcgacgaggccgcgcgcgtcaaggcggccgccgccgcgcgccctcgttccgacctcctctggagggtaattgcgcgccgaggacatcaccgtggtcaccgtcgacgaggacgagcgcaaggccccgctgttgcaaacgcactgccatggacacggtcacagccacagccacagccatgtgcatgagccggtgcaagtagagggtagcgagggggaggtgtcggcg

SEQ ID NO: 5140 - DNA, 2969 bp, Zea mays
caagataaccatactcccagtgacacctttttcaatatatattctcttatactgcaaacataatgaaaaaggtgtcactgggggtatggttatcttgctagatctgctagtgcccgttctgatggcctccttttgctttgtggtggaagggatgccaatagtgtgccactatcaagtgcatatgggcttgctaagcatagagatggacgctgggagtgggcaattgcccctggtgtgtctccatcacccagatatcaacatgcagctgtttttgtcaatgcacggcttcatgtctcaggaggggctcttgggggtggtcgcatggtagaagactcctcaagcgttgcagtattggacactgctgctggggtttggtgtcacaccaaatctgtagttacaactccaaggacaggaagatatagtgcagatgcagcaggtggtgatgcttctgtagagctcacacggcggtgcaggcatgcagcagccgctgttggtgatttgatatttgtttatggaggtttaaggggaggtgtgctgctagatgacctcctagttgctgaagatcttgctgctgctgaaacaaccagtgcagctaatcatgcagcagcagcagctgcatccacaaatggacaaagagaacctggtagatatgcctacaacgatgaacaatcaggacaaactgttacagtttcaagtcctgatggagctgttgttcttgggactcctgttgctcctccggtcaatggggacatgtatactgatattagtcctgagaatgccattatccagggacagagaaaaatgagcaaaggtgttgattatttggttgaagcatcagctgcagaggctgaggcaatcagtgctactttagctgctgtaaaggctaggcaagttaatggtgagatggagcattcacctgatagggaacagtctccagatgctgcaccaagtaccaagcaaaattcaagcctcataaaaccagatgttgctcttgtcaacaattcaacagcacctcctggtgttcggttgcaccatagagcagttgtggtggctgcagaaactggaggtgccttaggtggcatggttaggcagttgtccattgatcagtttgagaatgaaggtagaagggtcatttatggaacccctgagaatgcaactgcggcaaggaaattattagatcgacaaatgtctattaatagtgtgcccaaaaaggtaattgcttctcttctgaaacctcgtggctggaagccccctgttcgaaggcagttctttcttgactgcaatgagattgcagatctatgtgatagtgctgaaagaatattttcaagtgaacctagtgtcttacagctgaaagctcccattaagatatttggtgatctgcatggtcaatttggtgacctcatgcgcttatttgatgaatatggcgctccttcaacagctggagacattgcttacattgattatcttttcttgggagattatgtcgatcgtggtcagcatagtctggagacaatcagtcttctccttgcactgaaggttgaatatcctcacaatgtacatttaattcgagggaatcatgaagcagcggatatcaatgctctttttgggttccgaatagagtgcatagagagaatgggtgagcgggatggaatctggacctggcaccgtgtgaacaggttatttaattggcttcctttggctgcactaatagaaaagaagataatttgtatgcatggtggtattggtcggtccatcaaccatatagagcaaattgaaaatcttcaaagaccaattaccatggaagcaggctcagttgttctgatggatcttctgtggtctgatccaactgagaatgatagcgtagagggactcaggccgaatgcacggggccctggtcttgttacctttgggcctgatagagttatggagttctgcaacaacaatgacctgcagttgattgtgcgagcacatgagtgtgtgatggatggctttgagcgattcgcccaaggtcacttgatcactcttttctcggcaacgaattactgtggaacggcaaacaacgcaggtgcaattttagttctcggaagggatctggtggttgttccgaaactcatccatcctttgccgcctgctatcacgtcacctgagacctctccggagcatcatattgaggacacatggatgcaggagttgaatgcaaacagaccaccaacaccaaccaggggccgccctcaagcccccaacaatgaccgaggctcccttgcctggatataacaggctggccatattattaaacaattgatttcttgtctcctatcattggcttgaggctaaaattatccatccattctggacacatggaagcactctgctgaaagcacacactggcccaaaacaatgtcgaaagaaaactgttcagggagcgagactaagcggtgctctgaaggcgaaggccagagaagagtcactgtcgacagcgctccccaaatcctttccacaaacaagtagaagagcagaaccaagtgttggtaaaccacaggatcttgcctgggatcgcgcctgtacatactcagacgccagcagatagaggaggggttgtgtatgtgttctttttgtcttagcgtcgaaagggatagcagcgtccattgtactaggtattcatttgctgtagattttgatttgttgcctcatgttgcaaagtatggagtgggaaagttggtttcctcgtgtgacggacggtggtctgtcaggtcttgtataatagcgttgtcggctgtttatgtttgcagcgagtcagctgttacttagcacaccttacacctccctcatgttgtaattcccatcaccggtgctgatgaatgtgcacaatatattgttgtctgttgtccaaagttttgggtcctggacgggttaggtgatttgatttggtttattggagaagcaatacgttgtttgattttgaaaaaaaa

SEQ ID NO: 5141 - DNA, 1520 bp, Zea mays
ctgctctcgaaagaacaaccgaacaaacatataacagttctaaaagggcataccttctaggggtaaatctgactacctaatcctaaccactaatctagtgcttgaataaatgagatctcttttggcgaagaggtgatgtttcacaacagattgcatgcagatcccgcaccatctgtacaagatcatgcatgcatgcaatggtccatccctgccagaccagaaaaagatcagatggtcggcgactgggatctggagacattcacacaatggttaatatgaaaaggtaggttgcccgtacagggcaacactcttttttttttttttttgcatgaatacaacattcaatacgtagaatcatgacagtacaatgcatgcagtcaggacgatgaattgtgagccgctgcaagagtagcttagagaatgaattcacccaggccacagcaaaggatagtcgtcttacatgtcatgtgtccctgaacccaaactgaatgagaaaggatgttattctatagcggttggtacagacaatgtctctccagtgatatttcttcattttgttccttcgtatctttacttgaagcccatagcttgtctgaatccactatcacattgaaacctaggggacagatgaccaaaaagcaagccaagaactagggacggagctgctggagggctgtaccacctaaaggtacaatgttatcagctctgaagtatttgcagcgcctcctactcgtctggctttgaggccaagatcttgcagacgggcatggtctcgtttttactcagcaacttgagcgatggatggacgggaatgtcatgcatcaataccctatctccgacatcaagatttgtcaggtccacctcaatttttggagggatgtgctcagctgggcagagatacaccaggctggtccttattttctgcaaaaagcctcctttcttcaacccagggcaagcatcctctcccttgaactctacaggcaaatccaccttcagcattgttccttcatctgccttcaccattaccaaattcagtatattcccagaattttcatctctatgcaccttgatggggaggacggtgccggcgtggaggatggcgttggatcgctcgcccgcgcggacctggaggcggacgggggtggagaggaagtagggcgactgcttgagcatctccgcgagctgcctcctgtcggcggtaaggaggtgccggtgggcaattccgttccctggcgcggcgcccgcgagcgtgagcaggaccgccgggacgcggccgtggcggcgctcgcgcgccgcggcgcgcgggccggctgtctcccgcggtacagcctggatcgtgtggtggtacgacgcggaggccgtccgccgccatggcgccggagacgacgcgcgcagcgccgccgccccggtggcggcggcggcggccttgccgcgaaggaactgcgccattctcaggttctgggttttggtcgtgctgggctttggctggagcctggagggatggcaatcccggccggcct

SEQ ID NO: 5142 - DNA, 2341 bp, Zea mays
ttgggtacctcgtggccggcccgggcggcatttcgcatcgttcaattcagaatctgatacatcagagaagggccacagcacagagagagactgtctgccagtggacgcgagggagcgcctccgcctcagatccaacccccaccgatgcgagctccggcgatgctccgctgggccgcggcggcgctcgcggcgctcctcgccgcctcaccggccgccgcgttttacctacccggcgtggcgcccaacgacttccataagaaagatccacttttggtgaaggtgaataagctgacatccacgaagacgcaacttccctactcatattactctcttcctttctgtaaaccaaacacgatagttgacagtgcagagaatcttggagaagttctgcgtggtgatcgcattgagaactctccttatgtgtttgagatgggggaacccaagatgtgccagattatctgcaaagcaaaaattgatgataaacaggcaaaggagcttaaggaaaaaatagaggatgagtatcgggtgaacatgattcttgacaatctcccactagttgttcctattgcaaggcaggataggggtgctactgtttaccaggctggatatcatgttggtgtcaagggccaatacactggtaacaatgatgagaagtcctttatccacaaccacttggcatttttagtaaaataccataaggatgaaactacagatctctctagaattgttggatttgaggtcaaaccattcagtatcaatcaccagtttgaagggccgtggaatgataaaaacactcgtttaatcacatgtgatcctcatgccagcaagcttgtggtaaactcagatactcctcaggaggttgaagccgggaaggaaatcatatttacctatgatgtaggcttcgaggagagtgatatcaagtgggcttctcgctgggacacctacttgttaatgatagatgatcaaattcactggttttctattgtgaactctctcatgatcgtactcttcttatctgggatggtggcaatgattatgctccgcaccctttatagagatatctctaggtacaatcagcttgaaactgaagaagaagcccaagaggagacaggatggaagcttgttcatggagacgtattccgccctcctgcaaactccgacttactctgtgtctgtgttgggactggtgttcagttcttcggtatgctactagtaaccatgatctttgctgttctgggtttcctttcgccatcaaaccggggaggactgatgactgccatgctgctcacttgggtcttgatggggttgttcgccggatatgcttcttcacgcctgtataagatgttgaaaggatcggaatggcggagcatcaccctgaggaccgccttcctgtttcctgggattgctttcggtattttcttcatccttaatgctctaatatggggggagaagtcgtctggcgctgttcctttcaccacaatgtttgctttggtcctcctctggtttggtatctcggttcctcttgtatttgtcgggagctatctgggcttcaagcaacctgccattgaggctccggtgaagacgaacaagatcccaagacaggtccctgagcaggcttggtacatgaaccctgccttcaccattctgattggtggcatacttccgttcggagcagtcttcatcgagctcttcttcatcctgacgtcgatctggcttcaccagttctactacatctttggcttcctgttcctggtgttcattatcctcatcatcacctgtgcggagatcacgatcgtgctgtgctatttccaactgtgcagtgaggactacctgtggtggtggaggtcctttctgacctcaggatcatcagcaatctacctcttcctgtacgccgggttctacttcttcactaagctacagatcactaaggttgtgtcaggcatgctgtactttggctacatgcttcttgcctcgtttgctttctgtgtgctcaccggtacgatcggcttctacgcctgcttctgcttcacaagattgatttattcatctgtgaagatcgactaggcatgttccatgggcctgcagcgagtatgcccattgtgtgttttttttcatgaattttcagtgcagctgtacttttggtgttagcttataaacaatttatgctcactgtggttcagagttgtacaaggataggacactactgctagctttatatggggtaattttaacttgtgctgttgagaactgctgcatacgttcaatccatagtctcgttatcgtctgccaccaatttcctgcttcagctgcatgatgatgtccccgcgtgcttggcttcatc

SEQ ID NO: 5143 - DNA, 3850 bp, Zea mays
gtcgacccacgcgtccgctaggatcaaaaccgtctcgccgctgcaataatcttttgtcaattcttaatccctcgcgtcgacagcgacagcggaaccaactcacgttgccgcggcttcctccatcggtgcggtgccctgtccttttctctcgtccctcctccccccgtatagttaagccccgccccgctactactactactagcagcagcagcgctctcgcagcgggagatgcggtgttgatccgtgccccgctcggatctcgggactggtgccggctctgcccaggccccaggctccaggccagctccctcgacgtttctcggcgagctcgcttgccatggagggcgacgcggacggcgtgaagtcggggaggcgcggtggcggacaggtgtgccagatctgcggcgacggcgtgggcaccacggcggagggggacgtcttcgccgcctgcgacgtctgcgggtttccggtgtgccgcccctgctacgagtacgagcgcaaggacggcacgcaggcgtgcccccagtgcaagaccaagtacaagcgccacaaggggagcccggcgatccgtggggaggaaggagacgacactgatgccgatagcgacttcaactaccctgcatctggcaatgaggaccagaagcagaagattgccgacagaatgcgcagctggcgcatgaacgctgggggcagcggggatgttggtcgccccaagtatgacagtggcgagatcgggcttaccaagtatgacagtggcgagatccctcggggatacatcccatcagtcactaacagccagatctcaggagaaatccctggtgcttcccctgaccatcatatgatgtccccaactgggaacattggcaagcgtgctccatttccctatgtgaaccattcgccaaatccgtcaagggagttctctggtagcattgggaatgttgcctggaaagagagggttgatggctggaaaatgaagcaggacaaggggacgattcccatgacgaatggcacaagcattgctccctctgagggtcggggtgttggtgatattgatgcatcaactgattacaacatggaagatgccttattgaacgacgaaactcgacagcctctatctaggaaagttccacttccttcctccaggataaatccatacaggatggtcattgtgctgcgattgattgttctaagcatcttcttgcactaccgtatcacaaatcctgtgcgcaatgcatacccattatggcttctatctgttatatgtgagatctggtttgctctttcgtggatattggatcagttccctaagtggtttccaatcaaccgggagacgtaccttgataggctggcattaaggtatgaccgggaaggtgagccatctcagttggctgctgttgacattttcgtcagtacagtcgacccaatgaaggagcctcctcttgtcactgccaataccgtgctatccattcttgctgtggattaccctgtggataaggtctcttgctatgtatctgatgatggagctgcgatgctgacatttgatgcactagctgagacttcagagtttgctagaaaatgggtaccatttgttaagaagtacaacattgaacctagagctcctgaatggtacttctcccagaaaattgattacttgaaggacaaagtgcacccttcatttgttaaagaccgccgggccatgaagagagaatatgaagaattcaaagttagggtaaatggccttgttgctaaggcacagaaagttcctgaggaaggatggatcatgcaagatggcacaccatggccaggaaacaataccagggaccatcctggaatgattcaggttttccttggtcacagtggtggccttgatactgagggcaatgagctaccccgtttggtctatgtttctcgtgaaaagcgtcctggattccagcatcacaagaaagctggtgccatgaatgctcttgttcgtgtctcagctgtgcttaccaatggacaatacatgttgaatcttgattgtgatcactacattaacaacagtaaggctctcagggaagctatgtgcttccttatggaccctaacctaggaaggagtgtctgctacgtccagtttccccagagattcgatggcattgacaggaatgatcgatatgccaacaggaacaccgtgtttttcgatattaacttgagaggtcttgatggcatccaaggaccagtttatgtcggaactggctgtgttttcaaccgaacagctctatatggttatgagcccccaattaagcagaagaagggtggtttcttgtcatcactatgtggcggtaggaagaaggcaagcaaatcaaagaagggctcggacaagaagaagtcgcagaagcatgtggacagttctgtgccagtattcaaccttgaagatatagaggagggagttgaaggcgctggatttgacgacgagaaatcacttcttatgtctcaaatgagcctggagaagagatttggccagtccgcagcgtttgttgcctccactctgatggagtatggtggtgttcctcagtccgcaactccggagtctcttctgaaagaagctatccatgttataagctgtggctatgaggacaagactgaatggggaactgagatcgggtggatctacggttctgtgacagaagacattctcaccggattcaagatgcacgcgcgaggctggcggtcgatctactgcatgcccaagcggccagctttcaaggggtctgcccccatcaatctttcggaccgtctgaaccaggtgctccggtgggctcttgggtccgtggagatcctcttcagccggcactgccccctgtggtacggctacggagggcggctcaagttcctggagagattcgcgtacatcaacaccaccatctacccgctcacgtccatcccgcttctcatctactgcatcctgcccgccatctgtctgctcaccggaaagttcatcattccagagatcagcaacttcgccagcatctggttcatctccctcttcatctcgatcttcgccacgggcatcctggagatgaggtggagcggggtgggcatcgacgagtggtggaggaacgagcagttctgggtgatcgggggcatctccgcgcacctcttcgccgtgttccagggcctgctcaaggtgctggccggcatcgacaccaacttcaccgtcacctccaaggcctcggacgaggacggcgacttcgcggagctgtacatgttcaagtggacgacgctcctgatcccgcccaccaccatcctgatcatcaacctggtcggcgtcgtcgccggcatctcctacgccatcaacagcggataccagtcgtggggcccgctcttcggcaagctcttcttcgccttctgggtcatcgtccacctgtacccgttcctcaagggcctcatgggcaggcagaaccgcaccccgaccatcgtcgtcgtctgggccatcctgctggcgtccatcttctccttgctgtgggttcgcatcgaccccttcaccacccgcgtcactggcccggatacccagacgtgtggcatcaactgctagggaagtggaaggtttgtactttgtagaaacggaggaataccacgtgccatctgttgactgttaagttatatatatataagcagcaagtggcgttatttacagctacgtacagaccagtggatattgtttaccacaaagttttacttgtgttaatatgcattcttttgttgatataatttatactttgtggagagttgctgacagacgagttttgtatgctacgaaaaacaaagaaattagtttgcattctttcactttggtgcatctccatgagaaatt

SEQ ID NO: 5144 - DNA, 1985 bp, Zea mays
ggccctaggggcctttttggcttttttttttctcattttttttttcttttctatgcctggcctagcaattctctgaaaagctttattacatgttcatcgagtcgtaactcgtaacaccgtgtctcaccagcaagcggagcgcccatacaaggtaaataacgtatggtcgccagatgaggttttcagagcctaagaccaggaccttttctgagcctacaaacatccagaggtacatgctcgaaatgtcatgagcagcatgtgtgttttgttacattgtaaaatcaagcctctgggagcttgaagatggctccgaaaggtttccagaagtccacctcttcagcatctccagagcagccttcggttgatccataggtaccatgtgaccagcatcgtgaaccttcaagaaactcaaaggaccgtggctctttagaacgccagcttctttcccgtcgactgtgaagggcttctcggatgaggacacaaaagcttcctttccagaccattccatagagtttacccaccttgagttcccaagccagttacatatgaggtcatactctccagcataaatcaacactttgatgtcgctctcaaggagttcagggattccaacttcaaggttcctcatccaatctaatagcatggcctcatagacagttgggctgcatgaaacaaactctatatctccaacccctaggctctctctgacagatttgaggttgagaaatttctccaaattagagaaatcatagcataggcttccgatgcatggtttcctgatgtcataataatttttattgcctatgattgtcctgatggcactgaatattgtattgcagacaaagtacgcagcaaggcaagatacagttccagaagtaccacaaagcttgaccgcgaattcacaagttggaactattttattgatcctgttaaattgtgtttttgtaattaatcccatatccaatgcgtaatcagggtatgccttgtactgtattgctggatctgttagtccgttgccaatagcaaaacccttcaagttaatgtgaatgccctcattgttcttgtttccctggtgcacacgacttgcaaaggcaggaatgtaatgcccagcatatgattccccagttatgaagaaatcatttttagcatactttgggtgctcagcaaaaaaggcctgcaggaagtcatatagatcattgctaatagtagcttcgttgtggcgagtgtcacgcgaatccgagctgtaactaaacccagttccagtgggctggtcgacatagataagatttgatgccttgtcccaaccaaaatcattccagacgagcgacaagttgtccgctatgttgaaggggccgttctcgtagaagagcgcgagctcgctgctgcagccgggcccgcccgtgagccagatcaccacggggtcgtccttgtggcccctcgactcgaagaagaagtagaacatcctggcgtcgtgggtgttggggaggcggtaataccccgcgtggtggccgaggtcctccaccgacgtggcggcgcctccgttcgcgaaggacgcgatgcggatgggcctctcgacgagggtccccgcgggggcgagggcgccctctacgccggcggtggagaggggaggggacgcgtcggcggggtggaggttgagcgcgtggatcaggtcgacggccgcggagcgggggaaccggcgcggagacgaggaggggaggcggaggatgctcccatatccattctcccacgagccgccggcggcagcgacggaggcaacggccaggaggaggaacgggaggagtagctggtcggcgggccgcatgattggtccggcctccggcgacatatggcgatgtggggggagtgaatcagaagcgggggcggagtcttccttcaagagagcggtagcgcgagaggagccagccgccgcgtcactggattttgctcgggccccaccgcccacaccggccggcctcgaggtaccc

SEQ ID NO: 5145 - DNA, 1765 bp, Zea mays
  misc_feature (22)..(22): n is a, c, g, or t
ggtcccgggtcccccccttcgngacccccgccctcggccgccgcgcgccaacagagcaacgcccaggcacacacgacgcggaccaggcaaccagctgccgagggaggaaccctagcggaacactgtgcaggtgacggcggcgcgctaccggtgacggcggcgcgctaccggtgacgggggatacggtggcatcgtccccctcggcccctcttccatccccggcgcggcggcgccagcagccggcctgcagggcttatattttacggtgagcacattcttttgctgatggagaccactgaacctctacaggatatcatgtgtgagtttcgtgctggtaagatgtctcatgagggaacacgagtggttccagacacgcgcaagggtcttgtccgcgttggtaggggtgaagagggattagtccattttcagtggcttgaccgtggacagaacatagttgaagatgatcaaatcatctttcctgatgaggcggtctttgagaaggtgacagaatctcctggaagggtttacatcttgaagtttaagcaagacagcagaaaattcttcttctggatgcaggaaccaaatgctgatggggactcccagacttgcatgcaagttaatgcctacataaatcgatcattagatgctgaggctgatcttcgagtacctattgaagcagaaatgtctgaagatacggctgatgatgatatctcttccagagctgggaatctagttgagagcatgaccgctgatttggctggtgaagtgacgtctgctgctggacctgtacgcttggaggatctgcagagaattctgagtgcaatacagtcatcaggtgctgcagctgaccctgatgctggagtaggactaggagacatcttgaagcctgatctggtcttgccattaattgaggacttgcccattgaacaattggcatcacatcttccggagggtggctcatggagtcctggtgatatcgttgagcttctccaaagtcctcctttgcgccaacaattagatgcattcacccacgttctgcggactgggcagatagatcttgctcaatttggagttgaccctgacaaatataagttcacggtggtgtcgttcctggaggcattggaagactcggttggaagaggtgcttctgaagctggagacaaggatgcagaggtcgagcgaggcagtggaaatgatgccatggacgagagttgatatccgtgtactaggtgtctgaattcatacgtgacaagtcttgtgttgttgttttgggtagaacgctagctcatagtattttgggcttctggcacacagaaagcaagtttctggacaagttttggacattattgctgctgtgagatgtagtgctaggcaacagatggtctggttggtggatcatggattccatggcattgagaagcttgcaaggctagattgattgtgttctgcgggggtaaatcttgcgtggcgttttgaacgtggattggtaaacagaatagcatcttttgaacgtcggttgttccatgtccacagctgatggtggtggcctcgaatgtcgtactgtacgtccatgtcgatgattccgtcgcaggagcctactactactatatccctgttctatgtaagatatgtgtactccagtacaaacagtatatggacagctcaggatttttttatattgttctacacatacatctttagatgatttttaaaaaaaaaaaaaaaaaaaaaaaaaaaaaaaaaaaaaaaaaaaaaaaaaacctcg

SEQ ID NO: 5146 - DNA, 2001 bp, Zea mays
cccctgttcccagaggcggcagggtgggcgaccagtctcctccgcacgcttcccaccgagctcacacactgcacactcccacactcccactcccacctgtaggttcacgggaggcgaggaccctgccccccctgcattcttcccgtatcgcggaccgatcctcgccgcgggaggcgagcggagcggggcgtttctgcgggggagaagcgcgtccctgcaatttctgagagaggggaggcggcgagtggaaaagagcaggcgttgctatcctatcttgctgacacagcggcggtgtggcgaggcgcatggcgagggcgcgcggtggcgccgcgtggtgggtgctggcagcggcgtgggtgctgtgggcggctgcggctgcggcggaggcggaggccaggtcgccgtcggcgaggagggtgcaccggcacctcaagcgcctcaacaagccggccgtcaagagcatcgagagtccagatggagacatcatcgactgcgtgcatatctcccaccagccagcgtttgatcatcctctcctcaagaaccacacaatacagtttaggccggcgtaccaccctgaaggtctatacgatgataccaagagcagcataggctcaaacaatgctggcgagaggccgatgctccagatgtggcatcgaaatggcaggtgccccgagggcacggttccaatcaggagaaccaagaaggacgacctgcttcgagctagctccgtgaggcggtatggcaggaagcggcacactgctccgaacccactgtctgttgatcccaacatgctcagcgagggtggccaccaacacgccattgcgtacgtccagggcgacaagtactatggtgcaaaggccaccattaatgtgtgggagcccaagattcagcaggctaacgaatttagcctgtcccagctctggatcttggggggttcatttggggaggatctcaacagcatagaggctggctggcaggttagccctgacctctatggagacaacaacaccaggctgttcacatattggactagtgatgcataccaagccacaggttgctacaacatgttgtgctctggtttcattcagataaacagcgaggttgccatgggggctagtatcttccccatctcgaactacgcgggctcccaatatgatattagcatcctgatctggaaggaccccaaggaaggaaactggtggatgcagtttggcaaggaatacgtcctgggctactggccgtccttcctcttctcctacctcgcggacagcgcgtcgatgatcgaatggggcggggaggtggtgaactcggagcccgacggcacgcacacatcgacccagatgggcagcgggcacttcccggaggaagggttcagcaaggcgagctacttcaagaacgttcaggtggtggacagcagcaaccagctcagcgcccccaagggcgtaggcaccttcaccgagcagtccaactgctacgacgtgcagaacggtaacaatggggactggggcacctacttctactacggcggccctggcaagaactcgaactgcccgtgactggtgcttctaatgtgtagtgtgaagtgccgtcaccactagcaaaatgtaacccaagcgttcaggttcgcttatacagcgtcaatctgcatctccttgttcagtcctagctaggtagtgtgtaacatgtgcatgtgctctctagactctaatgttttcttcttcttttcattgtattttcttcttgtgccatgtaaagtttctgaagagaaggagcatggcttgaggctgcggtgggtggttgggctggtcggtggtgacctctactgatttttgcgaagtctgcttattggtcaccttcgccagttattttgaaagtgtgctatagcttgtttgatgatgaatgatagtaatgctgtaatggtattgagcttagtggttattattgcatccagttaaaccacccccggcggggtgttaaaaattcagaaattgttgataagct

SEQ ID NO: 5147 - DNA, 2880 bp, Zea mays
attttaatataggatagagagagtatttttttaagacgagtggattgacatatttgatggaaatatatacattaaatattgtatggagatacacaaataatggggtgtttttttcttaacttgatcgatcagcctatattcatgtagccgaagctgggaagtggggatgtggaatacagccaccgacattttgttcacaatgtccgaaaaagggaaagaataactttttcctttgctcatttggcaaaaatacacgcaacactgactcctgtgcatcggctctgcaggcgggccctacaaatactccctgcctcccctgctttcttccacccaaatttgcttcccagatctgccgccgcacccccaacccgtggcaatcaatccccttcctcgcttcgcaaatggctcattccaacggcgcggccgccactgccactgccggcggcggcgacgtggacgacgagaccgccccggtgccgcgggccctcgcgccggcgcggaaggtggcgctgatcacgggcatcacggggcaggacgggagctacctcacggagctgctcctgtccaagggatacgaggtgcacggcctcatccgccgctcctccaacttcaacacgcagcggctggaccacatctaccacgacccgcacgcggtgccgtcggccccgcgtcccccgatgcggctccactacgccgacctctccgactcctcctccctccgccgcgcgctcgacgccatctcccccgacgaggtctacaacctcgccgcgcagtcgcacgtcgccgtctccttcgagatccccgactacaccgccgacgtcaccgccacgggggcgctccgcctcctcgaggccgtccgcctgtcgcgcaagcccatgcgctactaccaggccggctcctcggagatgttcggctccacgccgccgccgcagcgcgaggacacgcccttccacccgcgctcgccctacgccgccgccaaggtcgccgcgcactggtacaccgtcaactaccgcgaggcctacggcgtattcgcctgcaacggcgtgctcttcaaccacgagtccccgcgccgccggcgagaacttcgtcacgcgcaagatcacgcgcgccgtcggccgcatcaaggtcgggctgcagaccagggtcttcctcggcaacctctcggccgcccgggactgggggttcgcgggggactacgtcgaggcaatgtggctcatgctgcagcaggaacagccgggggattacgtcgtcgccactgaggagtcccacaccgtcgaggagttcctgcaggctgccttcggctacgccggcctcagctggaaggatcacgtggtcattgacaagaagtacttccggcctgcagaagtcgacagcctcaagggggacgccaccaaggcgaggaaggtgctcaagtggaagcccaaggttgggttccaggagctcgtggagatgatggtcgatcacgacattgagctcgccaagaaggagaaggtcctggtggatgctgggtaccgtgatcccaagcagcagccatagaaacatcacagttgcttcttgctctgttggggctcggattcagattgttcccctcatacatggtggttctcaggggtagaggttgaccgaagttactatcgatatttatcctggtaagaaataaggattgttgcagtatgatcttacagtgtgttcatttagttttctgactatgttatgtgctttaatcgaatgaatgaataatccgtgccaatttggtatttggaagaggatgatatgcctgcctgattgcagctgttgatgttaagagcaaaagtgtcctcctgatagcagctgcttcagtttgtattgttccacttcagctactcccacacttgttctgatacatggcagaaaagctgttgtagggacattttgtaagttgaatcagtggcaaatgcatccaacaacacttgcagttgaagaggggaacaaacaaaaggaaacaaaaaatagcacctaactctacctctacctgtgcagggagagcaattttaccattattatcaatggatttaccatgttggagtcacttgagttctcaatcttggtatgccgtgtcacttgagtcccccatcgtgcctcgcctcccctgtcacttgagtccccgaatgcttcaacgtgacacgtcacgtcgtcatctggtttggataaatccggtgttggatgattttgcttggatcggctaagttagatgatccgttttgctcattttctgagttcggtgacccaagttacacatcgtgtcaagttccagagccgttgctgcattttactctataatgtttatatctgtttttataggtttaattttataaaaaagtgtattcagtcacccccttgtgtggccatcggtaaggacaaaagacggtgagaagacaacatgatgaacaatgggagactaggacatctttgattggtgcctagtttgcatgtctaaccatagttaaagtacaaacttttgataaagtttgtcacaaaaatgagtcaacgacatgtagtacatggtgctttgaaagtggtgcatcattgttgttaatacgtgacaccatgataaagggtaccagagaaaaaaatacagaggtgtaggtctggaaccgctagcgctgacatgacaatatgcatacaacaatgtacggtgtagagaggtttagactcggtgtatatgtttatatgcaagtacgaacaaagcatatatacatagatcatgactgagctagcaaatgggaacaactcatgaatgctaataatcttccctggtgtctgtagtcgccgatcatcccgagatacgatgaggcgacaagaggggaaaatggaagccaatcaattttttgctgtcaaata

SEQ ID NO: 5148 - DNA, 2086 bp, Zea mays
gaagactataaagcaagctgtggactcgaggctcgccggccgccacagcgcagcaatatgctccaatgcaatcatgcatgcagggacaacagttgataccttcctcagagaaaacttggaatggctaggtagggcaaccaactgggccaagttcagtgccactgctggactaggcgtcattcacaggggccatcttcaacaaggccgcgcattgatggctccctacctgcctcagaatggtgctggtggtagtggtagcccatactcggaaggaggtgccctctatgctcttcgtttgattcatgccaaccatggtgaaggaatcaaagagttccttcgtgagagtcttcgcaacaccacttctgaggtggtccagcatggtgcttgtctgggactcgggcttgcagcattaggtacatcagacgaggaaatatgcgaggacatcaagaatattctgtacacagatagtgctgtggccggtgaagcagcgggtattggcatgggtttgctcatggttggcacggccagtgaaaaggccacagagatgcttgcttatgctcatgatacccaacacgagaaaattatcaggggtttgtcacttggaattgcattgacagtgtatggcagggaagaagaagctgacacattgattgaacaaatgactagagatcaagatcccatacttcgttatggtggcatgtatgcattggctctagcatacagagggactgcaaataacaaagctatccaccagcttctgcattttgcggtgtcggacgtgagcgatgacgtgcggaggaccgctgtgttggctctcggcttcgttctctacaacgagcctgaacagacacccagaatcgtgtccctactgtcggaatcatacaatccacatgtccgttacggtgcagctctagctgtcgggatctcctgcgccggaacaggattaagtgaagccatctccttactggagcctctgacatcagacgtcgtcgactttgtacggcagggcgcgctcatcgccatggcaatggtgatgatccagaccaacgagtcctacgatccacgcgtcggagcattcaggcgccagttggaaaagataatcctcgacaagcacgaggatgccatgagcaagatgggcgccatactggcttcaggcatcctcgacgccggtggcaggaatgtcaccatcaagctcaagtcgaggtcaaagcacgacaggctcaccgctgttgtcgggctagccgtcttcacccagttctggtactggtacccgctcacctacttcataagcctcgccttctccccgacggccctcatcggcctcaactccgacctgaaagtgcccaagtttgagttcctgtcgaacgcgaagccgtcgctgttcgattaccccaagccagtgacccagcagaccacagccacgtcagtcaaggtgccggcggccatcctgtcgacctatgccaagtccaaatccagggcaaggaaggacgcagagagcaaggccaaggcgaaagcagaggactcttccagtgcttctacttcgatgcaggtggacggcgcttctgctgctggtgctgctgcagagaagaaggccccggagccagagcctacgttccagatcctgacgaacccggcccgggtcgttccagcccaggagaagttcataaagttcctggaagacagcaggtacaagccggtgaaggctgccccctcggggttcgtcctcctgcaggacctcaagcccacggaggccgaggagctcgccctaaccgacgcgccgtcaaccgctgccacgacaagcaccccggcatccagcgccggcgagccggttggcatggctgtcgacgacgagccccagccgcccccggccttcgagtacacgtcataaataagggtggtgatcgtcggatcaggatgtgtgggttgggttgtgttgtctgtaggaacttcgtactggtgttggatggcgcgcggaacccgggcgtaccactaagctcatttatttaacttgaaaatatattttttttttccaaaaaaaaaaaaaaaaaaaaaaaaaaaaaaaaaactcgagggggggcccggtacc

SEQ ID NO: 5149 - DNA, 1331 bp, Zea mays
agaaattacgcatatacttggaagtggtatgtccaacaaaatgtgggaaacccttgtggagcatgccccgcccggccccttaagtggaaaatattacatatactattctgatgagactagaagtattggtgctattcgcaacaacatctatgcattctgtgggttgatttctggcgagcagttttattcatctgagagtcttgatgatagccaaaagctgtttgctgatgcattggtaaagaaagcatatgataactggatgtatgtcattgaatatgatggcaaaggtcttttgaaccctaaaccaaagaaaaagtctgcatccactggtcaagtggagacacatgctctgcgggttggcccgttggactattcaaacaataccatgtcttcgatggcatgccagggccatcaccatcaggtggaactgattctgcagggtatggcgtcgaccaaagcgcaacacatccatctcagctgcagagttcatccgccaatgtccaggcaccatatgatgacacattttcgttcttaccacctaacatgctgacagggtctgcaaatgatgccatgggtctggaactgggccagttgcagcaagtaacttctcaaggccagacaattcagccagcaaacgtgggatatggtgattggcccaggaaccgtgacagtcagtatcctgatgacttcactgaggacattcgcgttaagagccaccagttgctcgagggcgaggacatgcagcagctgctgagggtcttcagcatgggtggagcttctggcagtttgccagacgacaccttcaatttccagtcctacatgccctctccgttgcccaacctcgggttcgaaactgagcgtagccattcgtctggcaaagctgttgttggctggctcaagatcaaggcggcgatgaggtggggaatcttcgtcaggaagaaagctgccgagagaagggcgcagctagtcgaactggaggattgacaccgtggctttacaatggtcaaggttgccttgtagattactagtagttatctgcccccataccttcctgttaccgttgaaacaagtttctgaaactcttttctgaaatgtacaacgagtagttctactattttcttgtacagaattcaccttgttttgattgtgttagttgtggaacattgctctgctaagtttgacacatgactggacccgtatgcttgtgtatcttattttccatagctcttcagtgcagaatgtaccgcaacgatgcgaattaatccaaagattatgtgtacatgttgatgccttgcctttaaaaggcccccagggccaaaaagtcgacgcgg

SEQ ID NO: 5150 - DNA, 2305 bp, Zea mays
  misc_feature (1243)..(1265): n is a, c, g, or t
  misc_feature (1373)..(1377): n is a, c, g, or t
gcaaagcttccaggttgggctctcttggtcatctggtttgggaaggggctccaataagcaggctccaaacttcaatggcttggctgctttatcaagcaatctaaatccttcgagccgtgctgctgcccttttttttttttttttttttttcaacaaaatcactaaactgaatcaggtttcaaacaagcaaatacatgcagtctcaaatgcgacctttcaatacataggttcagaacatttgcggcagggctaaaaacataggcccacaggaagacaaagtaatgtagtgaggaatataaggtggtctatggcatccacacgggtcctcttaagcaaagcttccaggttgggctctcttggtcatctggtttgggaagggactccaataagcaggctccaaacttcaatgtcttggctgtttttatagtacgtgaggggagcaggggtggcaaaggtgaaaataacaggtccatcagatagctgctttatcaagcaatctaaatcctaataaccatgacgctttccatagtgaagagaactatgaccagataacccactattagaggagcgagcactgtacccgctgtaagccccatatcctcttccaggtgcctgggagccgccataacttgcatagctgtcagaaggaatcgtgtcatccgatgtacgaaaaccacttgaatatagatagtgcccaacaggcttggtgtctctgcctagatattttggttcatccgaaacaccagcaggcaaaggatggtaagggataacaggtggaaatgcagataaagagccctctctttcaaagaaattggctttcagccttgtagctatttgcacaagagcatttcttgcaacatcaaggcctccagtgatctgaaccatctcatcatcttctgctgctacctttggaacattttcttttgaaagaatacgtacattggctctggatgttctccgtatctcagtaatgattgagccacctttgccaattaggcacccaatacgtgatgttgacaccagcaagcgtgtagtatatgactgctcagccaattctaaatcacttttctcgctgcatctaggctgcaaacgaactgcagcatcaattgttggagatacaggatcttcaaagaactctttcgcagaaactgtaattatgcagtcatcatcagggtctgaattggagctagccactttgattaaagccccagactcctgcctaatctgtttgataattccaccnnnnnnnnnnnnnnnnnnnnnnncatttgcagcagcacaaagtaaacgcaagctaaactcctttgcagagctctcatcccttcgtggttggtataaagagggccaatctcctgctacatcacctttgtagnnnnnataaggaggaattactggagtgatccctacaacaggtgcagtagaggaaccaccaaggtggggtgctccctggataaggttgggtcaagctggatgcaagaagatgctgtgacttggatgggttgttatggaggcgagatgacacttgatgaagagcctttctgacaactaccgtgtccccagatatctggagaagttcgtctccactaatggcacatgcggggatatgatcattactaaggacacgtatttgtgcaccagtctcactgcggattccttggatgatctgcccaccttttccaataatgcatccaatctggtctgatggcacaagcaagcgaacagtaacttgaggtgaaatttcttcgctgtcttcgttcccaagaccctcatcactggcaagcctctcatgaactctaaagagggcatcctgagcagggcaaacctcatcttcagcaccatcgatggtattagttttcctgcttgtgctaaatatggtaacaactcgctcatcacatccagggacactctcgccaatcctgatcttagcttgggtctcagtcctcaactgctttgcaatttctccacccctgccaatgatactcccaatttttctagaggcacagaggtagcgatacacagtgtcatcaggaccaggtgcatatgtatcatcgccaggatttcttctcttactgcctccattttcagtaaaatcagactggcgctttccatgactgtttcggtggccagccattatctcggcggtctggggcagcgtcgcgagagagacgatgcggcccttgcggcggaacgatagatgccgccgtaaccaggagcttgcgaaatcgaggaggacagccgggcagggggaggctagggacaccgatcgacgaagagcgcggccgggccggcccggaggcccggcccg

SEQ ID NO: 5151 - DNA, 3827 bp, Zea mays
  misc_feature (480)..(480): n is a, c, g, or t
  misc_feature (515)..(515): n is a, c, g, or t
  misc_feature (568)..(568): n is a, c, g, or t
  misc_feature (649)..(649): n is a, c, g, or t
  misc_feature (787)..(787): n is a, c, g, or t
  misc_feature (964)..(970): n is a, c, g, or t
ctgctttctccagtgagccgcacccgcacccccccgggcccggattaaccacaagcgaccgtcgccttcccccacctcctcccttcctcaaaaaaaggcggaggcgggagtggtggtggtgctcgtgggcacgcagcggagcaccctgtacagcagcagcgctgcggcagtagagagtgccattggtggagctggtaactagccctcccccctccgttcccgtcccgcgcgcagccgtctgccgagcctgctcagtgcccatcatggtgaggaagaagagaactggccctggtggctctggagaaacttctggagagtcttcaggagcctctggacaaggttcctcacagcagcctgagcgaactcaacaacctgggggaggacgtggctgggtgcctcaacagggtggccatggtggtgggcaacaccagggtcgtgatcgacattatcagggacgtggaggaccagggccacatcacncttggtagtggggcacctgagtatcacccgcgtgnaataccagggacgtggtggtgaatatcagggacatggtggtgagtaccagggnacggggtggtgactaccagggaacgtggtggtggccgctccagaggtggaatgccacagccatactatggtgggcataggnggaggtaatgttggacgcaatgttcctccaggtccgtccaggacagttcccgagctgcaccaagccccatatgtccagtatccaggccccgggtggtttcgccctccccatcgggacctggctcatcctcacagcctnatggcagaggtgagctctggacaagtccagcaacagtttcagcaacttgccgatcgtggtcagagttccacgagccaagaaattcaggtggcaccagcatcaagcaaatcggttcgattcccgttacggcccggcaagggcacttatggggacaggtgcattgtgaaggcaaatcannnnnnngctgagcttcctgacaaagaccttcaccaagtcccccccccccccccccccgaggttacttcacgtggcgtcaatcgtgctgtcatgggtgagcttgtaacaatatatagacaatcccatttgggtgggcgtctacctgcatacgatggaagaaagagcctgtatactgctggaccattgccatttacttctatggcatttgaaattaccttgcaagatgaggaagatagtcttggcggtcgccaaggtggacataggcgtgagagagtatttagggtggtgatcaaatttgcagcccgtgctgatctccaccatctggctatgtttctagctggaaggcaagcagatgcccctcaggaagctcttcaagtgcttgacattgtactacgtgaattgcctaccgcgaggtattctcctgtcggtaggtcattttactctcccaacttagggagacgtcaaaaacttggtgagggattggaaagttggcgtggtttttaccaaagcataaggccgacacagatgggccttttcactgaatattgatatgtcctctactgcatttatcgagcctctccctgtgatcgattttgttgctcagcttcttaacagagatatctcagttaggccattgtctgattctgatcgcgtgaagattaaaaaagccctaagaggtgtgaaggttgaggtgactcacaggggaaacatgcgcagaaaatatcgcatttctggcctcacctcacaagcaacaagagagctatcattccctgttgatgatcgtggtactgtgaagactgtggtgcaatacttcatggagacttatggttttagtatccagcacaccactttaccatgcttgcaagtgggtaatcaacaaagaccaaattatctgcctatggaggtttgcaagatagttgaaggacagcgttactcaaagcgactcaatgagaaacaaatcactgctctactgaaagtgacctgccagcgccctcaagagcgcgagctggacatcttacagactgtgcatcacaatgcatactatgaagacccctatgcactggaatttggtataagaattgatgaacgtcttgctgcagttgaagctcgtgttctgccaccaccaagacttaaataccatgatagtggccgagagaaggatgttttgcccacagttggccaatggaacatgatgaataagaaaatggttaatggtggcagagtgagcaactgggcatgtattaacttctctcggaatgtgcaagatagtgccgctaggggtttctctcatgagttggcagtcatgtgccaaatatcaggaatggattttgctcttgagcctgtgctgcctccagtgactgcaaggccagaacatgttgagagagcgttaaaggcacgttatcaagatgcaatgaacatactgaggccacagggaagggaacttgatctgctgatcgtaatactgcctgacaacaatggttctctttatggggatctcaaaaggatctgtgagactgaactcggattggtctcccagtgttgtctgactaaacatgtttttaagatgagcaagcagtaccttgcaaatgttgcactcaaaataaatgttaaggttgggggaaggaatactgtacttttagatgctttgtcaaggagaatcccccttgtcagtgacagaccgaccataatatttggtgctgatgttacccatccacatcctggagaagattccagtccttccattgcagccgttgttgcttcgcaagactggcccgaggtcacgaaatacgctggactagtgagtgcgcaagcccatcgccaggagctgatacaggatcttttcaaagtatggcaggacccgcagagaaggacggtaactggcggcatgataaaggaacttctcatttctttcaagagggcaactggacagaagccccagaggatcatattctacagggatggtgtcagtgagggacagttctatcaagtattgctgtacgaacttgatgccattagaaaggcctgtgcgtccctggagcccaactaccagcctccagttacttttgtcgtggtacagaagcgccatcacactaggctgtttgcgaacaaccacagtgatcagcgcacagtcgatagaagcggaaacatactgcctggcaccgtggtcgattcgaagatttgccatcctactgagtttgacttctacctgtgtagccatgctggcattcagggaacgagccgccctgctcactaccatgtcctgtgggacgagaacaagttcacagctgacgagctgcagaccctgacgaacaacctgtgctacacgtacgctaggtgcacccgctccgtgtccatcgtgcccccggcgtactacgctcatctggcagccttccgagctcgcttctacatggagccagacacctctgacagcgggtcactggccagcggtgcccgtggccccccacccggtgcggcacgcagcagcacgagaggggccgggagtgtcgaggtcaggcccctacctgctctcaaggagaacgtgaagcgtgtcatgttttactgctgagacgctggtgggctgccttcgccaaggaaaatgccctggagcattcccatgtacccgcactgtttcggtgatacagtactatctaacgccgattttgcgcgttaagacttccagtgatctgggaaatttcttgtacgactgttgtagtgttgtgtattcgtaatgtgatgacgcggcagttgtaggagcttagtgccgtgtaaagtatctgttgtaagttgtaaccagtcaccctctagtgttatgtcatgatgaaccaaattatttgttgtcaaaaaaaaaaaaaaaaaagccagt

SEQ ID NO: 5152 - DNA, 1900 bp, Zea mays
  misc_feature (1895)..(1896): n is a, c, g, or t
  misc_feature (1898)..(1899): n is a, c, g, or t
atgaagaaaaattatttttgttttaataccttaaaaattagacaatataccactttattatgtatttatgaaaactataaaatatttgtcattttatctttttgagagtatcgttttggaatagccgacaaacccggtctcatagttcgaccgctgattttcgttttgttctgttcataaaatacgaaaacaaaaataatgtagatgttttctcatcattttcgacagtgcatcgactttaacctctggactggacacgtatctcaagtttcacctcacaggacagagggacagacacacgccccgaagggccagaacaaacgttccatagcccccagcattgtcacatgactcgcattcgcatggacccacccagccacgccccatgcccacgcgcgccccacgtgtgagactgagacgccagatccatccaacggttcgtgtcacaccacgccaaggccgcacgcaccgcggacgggtccacacgccagagactgaagctggcaggcataaactgtggggactggggagctcgttctctccgccggcccgctcactctccctggtctctcgtctcctccactccaagagaacaggcgccggcgaaaggcgggagcagcgcgctgcccattcaccgccccctgatttcttgggagttgcggatcggtctccggggcagcgtggaacggctgggcccctcggatcgccggagatgctgccctacgcgacggcggcggaggcggaggcggcgcttggccggcccatgacgcccgccgaggcgctgtggttccggtacaccgcgggggtgtccgactaccacctctactgctgcaacatcctcttcctcttcgtcgtcttcacggtggccccgcttcccatcgcgctcctcgagctccgggccccggccgcggtctcgccgtacaaactgcagccgcgggtgcggctctccagggccgagttcgtccggtgctacaaggacgtcctccgcatcttcttcctcgtcatcggcccgctccagctcgtctcctacccggcggtcaagtttgtgggaattcacacgaagttgcctttgccgtcccttgcggagttggcagcacagctactggtgtacttccttgttgaggactacctcaattactggatccacaggtttctccacggggagtgggggtaccagaatatccaccgtgttcaccatgagttcactgcgccaataggattcgcagctccatatgcacactgggctgaggtgctgatactcggcatcccctccttcgtcgggccagccattgttccaggccacatgatcacattctggctctggattatactccgtcaggtggaggctatcgagacacatagcggctttgatttcccattcaccccgacaaagtatattccattctatggaggagcagaataccatgactatcatcattatgtaggaggccagagccaaagcaattttgcttctgttttcacttactgtgattacttatatggcactgacaaaggttacagattccacaaaacatacctagcaaagctgaaggatctggggcataatgatggccagaaaggagacggcagcggacccagctacgtgaaactggattagattgcaagatatagtgcatcttgagtgtttctatggtcatcgacttcactgtggcatttcgaaatgggatattgctgagttgggctggtcacgtgtgttctcatttctgtagcaggcatacagctttcagctctgccttcttctttcttttttttttctagcgtttatgaaattctatggaacttgtacgctgacgaataacaacgcaactctcacgaataacaacgccaattcttaaaaaaaaaaaaaaaaacacaaaacaaaaggagcggggagnngnng

SEQ ID NO: 5153 - DNA, 2655 bp, Zea mays
cacaccacgtctcctccgcctgcgtctgcgtcccttcctccgcggacgccctcctaaaatccccagaggcccgccttgggaacatcccctccggccagcaaaccctaaccccatcccgcactcccccctcccccaacacgcgcgcgctttcttagccgctaagcatatccctccccgccacgatctcgatggtggagatgtctgtggtggagctcaggacgctgccgctcggcttccgcttccaccccaccgacgaggagctcgtcacccactacctcaagggcaagatcaccggcaggatcaactccgagtccgaggtcatccccgagatcgacgtctgcaagtgcgagccgtgggacctcccagataagtccctgatccggtccgacgatcccgagtggttcttcttcgcccccaaggaccgcaagtaccccaacggtagcaggtcgaacagggccaccgaggcgggatactggaaggctactggcaaggacaggataatcaagtccaagggcgacaagcgcaagcagcataccatcggtatgaagaagaccctcgtcttccaccgtggtcgtgcccccaagggcgagcgcacggggtggattatgcacgagtaccgcaccaccgagcctgagttcgagtccggcgagcagggtggttatgttctttatcgcctcttccgtaagcaagaggagaaaactgagcgctccagcccagaggaagtggatagaagtggctactcacctactccttctcgttcttcacctgacaacctagaggcgaatgaggaagctaatacaccattaaataaggaatctccagaatctgctctgcatgaaagcccgattgagctgccaaaatctgttgaaaccaatggtggttcaatgacaaggtggctggcggacagaaatggtaacttgatggctaatgcaccagatgtttcccatatacctttccatggacatgctgctggtgtagctaaggttgatccttctgttggtgcttcaggccacttagttaatccccacaatggaaatgatgattataacaaatttgtgtctgatttcacccccattctaccacttgaaaatgcattcttcactgatatacaacaaggagcttttggttttgatggcatcatgaatcctcttgatccccttgatgctttcttgaatcaaacacttgttgatcctgatgaacattcatcaacaacatcaaaagttcagtatgattctgacattccaacagaatttgagaaccattggaatatgaaggttgagcctcaagatgatcaatgctggtgggcaaacataggatttgagccagacgaaccaaatcctctgcttccttgtgacaccactgaccaagacatactttctgttgactctggtgctgattccttcaatgagcttttcaatagcatggaagagactggaattactgttaggcctcaacagttggactccactgtgcaaccaaaccatgtgttcgctagccagggcaatgcaacacggaggctgcggctacaggttgagtgtagggagatcataactaaagatgagagtgaagatgaagtatcatgtgttctaactccagactgtttgaacgattctgttgaggagtccactgcagagaaggatgtggcttctgatggggatgaggctgagtcaacagggattgttattagaagccatcaccctgctccaagatcaagctcagagaggtcattcactcaacagggaactgctatgcaaaggctgcggctacagtcaggccttaacaaaggccagcgtcctagtactgatgattcatcaagctgcattatagacgaaccaggaagtcagcacaaagcagaaaaagcagagattgaagaggatgcgagtacaaacctcgctggaagtgctgatgatctacctggtaatatccatgatgatgagcaaaagaacatccctgaacatggtgctgaaatgacttctccagaagccaaatctgttctgaggttgcggaagacttctgaggaaggcaacaaggatgtcaagcaggagagttgtctcgagccacacgtgagagcaccaatgcagaagggaggcttccaatcatacatcatctggctggttcttccggtggctctgctcctgcttctctgtgttgggacatatggatgggtatgaaatctatcctggtgcggtgcaaggcatgacattttgcgcacatgggttcctggcgtcaacctggtgtgcggtcttctgtacataacctgtggcatcctttcaacagccgtaccctgcagtaagacatcccggcattgccaaggcagctgaaaaataaataaaaaaacaagtggtagaaatgacaaggtggaaaagagcgaggtgtgttattgttggttttagtacatcgtagtcttcttttgctgttgttgtagatgtcttgctaatgttgtcgctgttgtgtagttgcaattcaagcccagggctgccagttttatttcctaatgtaatgtagcaagagcgagaccctgttagacgggtgcgctgaaattctgaacctctgtaatatctgatgttcttgtggatacctgtttcagaattttcggttcctgaacccagttactgatggcttgttgatcaaagaaaaaaaacggccaaaaaaaaa

SEQ ID NO: 5154 - DNA, 2687 bp, Zea mays
acgtacgcggggggtcgagagacggccgtctgctcagccgtcgttggcgacggctcgtttcagggtcccccacctactaatcacgaccctggcctctctcgattctgttgccttgccattgccatcatccaccctcatgcatgtcggtgcaacgcccatgggcatccactggtgcttatagtgcggccctcccgggccgggccggggaggacatcctcggccttccagggcagcaaccacgaaagccttctgcgcggggtgctttcctcgcagcaaatattcctgccttttgcattccggcttgcaagttccttgctttgggcagatatattgtgaggtctctatatataggtggttcgaggtgatcggcagaaccacacaggcaaagatggcgagcgtgcacaaggccaccacccttgttctcatgttctgcctgctagcgctggggagagcggagtacctcaagtacaaggacccgaagcagcccgtcgctgttcgcatcaaggacctgctgggtcggatgactctcgccgaaaagatcggccagatgacgcagatcgagagggaaaacgccacggccgacgcgctggccaaatacttcataggtagcgtgctgagcggcggaggcagcgtgcctgctcctcaggcgtctgctcaggcttgggccgccatggtgaccgagatgcagaagggcgctctttctacgcgtctgggtataccgatcatctacggtatcgatgcagtgcatgggcacaacaacgtctacaaagctactattttccctcacaacgtcgggcttggagctaccagggaccctgacctcgttaagagaattggagaagcaactgctcttgaagttagagctactggaattccttacgcctttgctccctgtatagcggtctgtagagatccaagatggggacgttgctatgagagctacagtgaggatccaaaggttgtccagtcactgacttcactcatctctggcctgcaaggtgacgctcctgcggattccgcgggaaggccgtatgttgggggaagtaagaaggttgctgcatgcgcgaagcactatgtcggtgatggtggaacgcataacggaatcaacgagaacaacacgatcatcgacacacacgggctgctgagcatccatatgcctccttactacaactctatcatccgaggtgtctccacggtcatggtctcctactccagctggaacggagtgaagatgcacgcgaaccatttcctggtcacggattttctcaagaacaagctcaagtttaggggttttgtgatttccgactgggagggcattgatcggatcactactcctcctcacgccaactactcttactcaattgaggctggtgttggtgctggaattgacatgatcatggttccattcagatacacagaattcatcgacgatctgacgacacaagttcagaacaaggtcatccccatgagcagaatcgacgacgccgtctacaggatccttcgtgtcaagttcaccatgggtctgttcgagaacccttaccccgactctagcctcgccggcgagctcgggaagcaagaacaccgggaactggcgcgcgaagccgtcaggaaatccctggttctcctgaagaacggcaagtcctcctacgctccgttgctgcccctcccgaagaaggccggcaagatcctggtcgccggcagccacgccaacgacctgggcaaccagtgcggggggtggacgatcacgtggcaaggaagcagcggcaacaccactgccggcacgacgatcctctccgggatcgaggccaccgtggaccccagcacgcaggtggtgtactcggagagcccggacagcggcgtgctggccgacaagtacgactacgcgatcgtggtggtcggggagccgccatacgcggagacgttcggcgacaacctgaacctgacgatcccggcgcccgggccgagcgtgatccagtcggtgtgcggggccgccaagtgcgtggtggtcctcatctccggcaggccgctggtggtggagccgtacctgggcgacatggacgcgctggtggcggcgtggctgccggggtcggaggggcagggcgtggcggacgtgctgttcggcgactacgggttcacggggaagctgccgcggacgtggttcaagtcggtggaccagctgcccatgaacgtgggcgacgcgcactacgacccgctcttcccgttcggcttcggactcaccaccaagggcacgaagtgagtgagtgtgaggcgctctgatgggatgtggcctgtgagtgagctgtgtattcgtgggcgggcgtgaggctctttggctttcgaattggttgggggtgacgggcggcgagtcgtgtacgccgcacacattgcgcagcgtacgttgggttgggatgtttgcgtctgggtaataacagtgatgcattcttgagatggttgctgttagtgtgggttgtttggaatgaacaataagatcaggcgcgttacattggcacgctactacctctcctgctgagaccagagatggcgatgtgcatttacccatcggcccgtgctattccataccctatttagccgtgtactgataaaagaatttgtcaaaccgtgtacgggtaaaatcatgtatccatgtactgctcactataccgtatacgccagctacttctactacc

SEQ ID NO: 5155 - DNA, 1310 bp, Zea mays
ttgggtacctcgaggccggccggggacgtggcagcggcgtgcccccccaaacgtttcgatatcccagagtggtgtggccgccgccggcggcttctttctccccttccattccgctccccgtgacgtcaccgaccaggcaagcactccgctccaccagagccgcctcgcctgtctgtccgacccacacacctaccggagcgcgcgtcccgaggtcggcggagcagggtcgggaggagggaatggcggtggtgggcgtcctcgcgctgcagggatcctacaacgagcacatggccgcgctgaggaggatcggggtgaagggggtggaggtgcgcaagccagagcagctcctcggcatcgactcgctcatcatccccggtggcgagagcaccaccatggccaagctcgccaactaccacaacctgttccctgcacttcgagagttcgtcggaggtggaaagcctgtctggggaacctgtgctgggctcatctttcttgcaaacaaagcagtagggcaaaaaacaggggggcaggaacttgttggaggattagattgtacagtccaccgaaacttttttgggagtcagcttcaaagctttgagacagagctttccgtgccaaagctttcggagaaggaaggagggaatgatacatgccgcggtgtatttatacgggcacctgctatattggaagtaggtccagatgttgaaatattggcggattgccctgttcctgttgacagacccagcattacaatatcatttggggagggtactgaggaagaagagtattcaaaagatcgggtaattgttgcagtgcggcaagggaacatcctcgcaactgctttccacccagaattgacatcagactccagatggcatcgtttcttcttggacatggataaagaatccccagcaaaggcgttttctgcgctctccctgtcgtcatcgtcaagagacactgaaggcctgccaaagaataagccgtttgatctgcccatttttgagtaacgctaaagacaagacaaaccaaaagattgaaggaacgaagaaactgaccgtatttattatcgatcatcatttagccggttacaaaaacagccagctgagaatctgtcatactcagccgaaaaaagtgttgtctggtagctaacttgtacggataaaaaataatcacgctgtgtgctgtacgcaattctcatcagataaagcgaaacattgttttcctgggaattatagttttgctgaaggtgaccagttgaacacttgaacatggttattctttccccctccgtgcggcttggttcaagagcc

SEQ ID NO: 5156 - DNA, 1670 bp, Zea mays
ccattgggtacctcgaggccggccgggcgacactctgcccagctaagctaagctccctccgtccatcggcatggcgactaccactactaccatcctcctcctcctcctcgtcgcagccacagccgtctcggcggccgacctctccgtgtaccacaacgtgcacccgccgtccccgtccccgctcgagtccatcatcgcgctcgcccgcgccgacgacgcgcggctcctcttcctctcatccaaggcggcctcgtccggcggcgtcacctccgctcccgtcgcctccggccagactccgccctcgtacgtcgtccgcgcggggctcggcaccccggtccagcagctgctcctcgcgctcgacaccagcgccgacgccacctggtcgcactgcgcgccgtgcgacacgtgccccgccggcagccgcttcatcccggccagctcctcctcgtacgcctccctcccgtgcgcctccgactggtgcccgctcttcgagggccagccgtgcccggcgaaccaggacgcctcggcgccgctgccggcgtgcgccttctccaagccgttcgcggacacctcgttccaggcgtcgctgggcagcgacacgctgcgcctgggcaaggacgccatcgccggctacgcgttcgggtgcgtgggcgcggtggccgggccgacgacgaacctgccgaagcaggggctcctcggcctcggccggggccccatgtctctgctgtcccagaccgggagcaggtacaacggcgtcttctcctactgcctgcccagctacaggtcctactacttctccggctccctccggctgggcgccgccgggcagcccaggaacgtccggtacacgccgctgctgaccaacccgcaccgcccgtcgctctactacgtgaacgtgacggggctcagcgtgggtcggacctgggtgaaggtccccgcggggtcgttcgcgttcgacccggccaccggcgccggcacggtgatcgactcgggcacggtgatcacgcggtggacagcgcccgtgtacgcggcgctgcgcgaggagttccggcggcaggtggcggcgccgagcgggtacacgtcgctgggagcgttcgacacgtgcttcaacacggacgaggtggcggcgggcggcgcgccgcccgtgacgctgcacatggacggcggcgtggacctgacgctgccgatggagaacacgctgatccacagcagcgccacgccgctggcgtgcctggccatggccgaggcgccgcagaacgtgaacgccgtcgtgaacgtggtggccaaccttcagcagcagaacgtgcgggtcgtcgtcgacgtcgccggctcgcgcgtcgggttcgcgagggagccctgcaactgagcccctgaatccgtccgtgccctatgcacgggaggaaggaggagacgcgctgcggctgccgcatcggtcggtgtgcagttagttgtcctgttagtctatgctacgttgtctgcactctgcaataacggacgtgacccggggaaaaaaactgtttcgtcacgggtagctagagaatcacgtaaggctcttgttttcgtttgtgtcctataatgtatggctattggcctgtttcgagaggttaaaatttggaggtgctgcatcaaattcataaaaaaaaaaaaaaaaaagcggccaaaaagcggcc

SEQ ID NO: 5157 - DNA, 3060 bp, Zea mays
  misc_feature (3052)..(3052): n is a, c, g, or t
  misc_feature (3056)..(3059): n is a, c, g, or t
gtccgctcgtggcgctgccgccggcggggagcctcgttgtctacttcccgcagggacacagcgagcaggtagcagcatctatgcgaaaggatgcagatgccaaaattccgagctatccaaatctctcatcatctgttttgtctagcgacagtatgcatattggaattcttgctgctgcagcccatgcagcagccaataacagccaattcacagtattctataacccaagggctagtccttcagaatttgttattccttttgccaagtaccagaaggccgtctatagcaaccaactatcacttggcatgcggtttagaatgatgtttgaaactgaagaatctgcaacaagaaggtacatgggaacaataactggtataagtgatatggatcctttaaggtggaaaaactcccaatggcgcaatattcaggttgcatgggatgaagcagcaccaagtgagagacgcaccagggtttccctttgggaggttgaacctgttatcgctccattcttcatttatccctcgccattgttcactgcaaaacgtccgaggcaacctggggtaacagatgatgatagctcagaaatggacaatctttttaagcggaccatgccatggtttggtgaggaggttggcaagagagatctgagtactcaaaacggtttagttcctggattaagtttggttcagtggatgaatatgcaacacaacccctctcttgccaacacggttatgcaaccggaattgctaaattcgttagctggaaaacctgtacaaactctggctgcggctgatctatctaggcaaattagcttccagccccagttcctgcaacaaaataacatccagttcaacacttcgctgctacctccccaaaaccaacagaccgaacagttagcaaatgtaatagctacaccaaaccaattgggaagtgttatagtaccacaaaaggcagttcaaaattgcagttctgaacagaaacagaatctggttacacaaccactgcaagtcagccaaccaatggttagtgtggcacagcctcaacttgtccatactcaactccagcaacctcaagtagttctccaggctcagcctcagcaacctcaagtcattgtccaagctcaactacaacaacagcaacctctggttcaaaatcacaccaccatacaaggtggccttcaacaaatccagcttctgcagcaacagcaagttcagcagtcagtgcaggaacaacagcaaataaagatacagccttttcaggtacctaatgatgccaacatggtaacacagttatctgatcagatgaaaatacaactattgaaggctctacagccacagcagcctctggtcatggaacagcagaaaatgatatttgatttgcagcaacaagcagtaaattctcagtcaactgctcagcagtgctcacaggtagctacccaagtggttggtttgcatagcagtagcactaatcagtacccgacgcagcaaaagactcaacctctcaaaacatttcaagattttcctgggaatgctgtttctattgtaaaaccagaaattgtcacctccgtgggtgctcgctctttgcatgtgcctggtggggtgcagtcaatgaagatggatgaagttccctcttcttcaacatcgccatccacaaacaacaatcctgttattttgcgatcaactccaagtagctccaagaaccaatgtttacctactgcagcaaaggctcctcagtcatctgttgtattgggttctacacttgaacagggtatgaagccttgtgacagtacacaacacccaatggtgattcccaagctggctgaagaaaggccagctactggacaagactacatgaacaacaatcagctggattatttggatacatcatcttcagcgacttcagtttgcctttcacaggctgatggatcgctgcaacaaagttttccaccttcatccttcaatcaacatcaaccgttgagagaagcagttccagatagtgagtttgaggttacagatgcaggaaataactttctatttggggcaaatatcgatggccatatggagcctcttaacgaagacgatttgcttggaactgccttcgaagctgacaagtacatggaacagatgccaggaaacggcatctctaactacatttcatcaaaggattctcagcaagagttatcatcttcaatgatctcacatccatttggcgttgctgatatcgcgttcaattccatagattcatcgatcaatgatatccaattcttaaacagaaattcccgggctccaggtcctgctcaacaacgtatgcgaacatacaccaaggtgcacaagcgcggcgctgttggaagatctatcgacatcaacagatattctgggtacgatgaactgaagcatgacgttgctcgtatgtttggaattgaggggcagctcagcgaccaaaacagagttggctggaaactggtttacgaagatcacgagaaggatgtcctattagttggtgatgacccatgggaggacttcgtgaactgcgtgcggtgcatcaggattctttcgccgcaggaagagaggcaaatgaggctggccagcgactacggagacagctttgttggcaaccaagcgtgcagcagctcggacggaggtcgcccgtggagggtcaccggcgactagaaatagcaggcgatgtctgagcacaaatgtttggtataatccgtccaacgatagcaagaaaatgatacgcgatttctgagcacaaacttttgcactcagatgatcgtgcaaacaattagcattttaagaaaaatgttgcagttcaatgtaactgcaggaatgtctctgatgtagcctcttcgatgtggcagccttaacaatcgatgtgctacagttactctgcctatgtatttactatactacctcggccttgtatatccttttgacgtaggagcagctggacgctgaaccccccggaggctgttagggacaataacaaccgttcataatttgccacagatacagatctgagtggacaaatggattcagtttacgtaaaaaanaaannnng

SEQ ID NO: 5158 - DNA, 2266 bp, Zea mays
  misc_feature (2130)..(2149): n is a, c, g, or t
  misc_feature (2153)..(2157): n is a, c, g, or t
  misc_feature (2159)..(2163): n is a, c, g, or t
atccccggtgcggcgcagcggttcctgcctcgtgcacgtctgtatacaccggcgcccccggcccccgccgcggaggaggggggaaggcagccagtcagccagaggagcctagagccagtcccgtcccgtccatcagccgccacaccacaaacacccaccactctgctctcgcccgcttgctttctctcccccgctccagcttatggcggaggcggcgccagcagccggcggcggcatcggggacatcctcgccacgagcgatcgggacttcctcgtccgcaactccggcgagcaggtgaagatcagcagcgttgaggcgagccctgtggccatctacttctccgcctcatggtgcccgccatgcaggaggttcacgcccaagcttattgaagtatacgaaaaactggcctcacagggcaagagcttcgaggtcgtctttgcttcggccgatcgcaatgaggaagctttcaatgaatactttgcaaagatgccatggttggctgtccctttttctgacagtgaaggccgtgaggcccttgatggccggttcaaggtctctggtatcccacaccttgtcatccttgatgcaaaaactggtgaagtttacactgaagatggtgttgaattcgtgagtgagtatggcgtggaggcttaccctttcacaccagatcggatcaatgaactgaaggaacaggaaaaggcagaaaaggagaatcaaactattcaaagcgtgcttggcacatctactcgagactatctcatttcaaacaagggagacaaggtacccatctctgagcttgaggggaagtatgttggtctttgctttgtggtggatggctttccaccactcgctgaattcactgaggtgcttgctaagatctatgagaaactcaaagaagtgggagagaaatttgaagttgtagctgtatccttggacagtgaagagtcatcatttaatgagagttttgcaaagatgccttggcttgcaattcctcaaggtgacattaagtgtcagacgctggttcgttactttgagcttagttctcttccaacactagttctgattggccctgatgggaagacactgaacaacaatgtcgccgacataattgacgaccatggttttgaggcatgggagggcttccccttcagtgctgagaagctggaaattcttgctgagaaggcaaagattaaagctgcatcacagaccttggagtccattctaatcagtggtcatttagactttgtcattggaaaagatggtgcaaaggttcctgtatcagaacttgttgggaagactgtccttgtttacttctcagcaaaatggtgcccaccatgccgtgccttcctgcccacacttgtcaaggagtacaacaagatcaaagagaagaacagtgattttgagatcgtcttcatctctagtgacgaggatcagagctcattcgatgattttttctctgaaatgccatggcttgctgtaccctgggaagatgaaaggaaagcatcgctgaagaaaaccttcaagatccgtggaatcccttcacttgtcgccatcggacctactgggcagacagtcagcagggacgcaaagtcccagctgatgatccacggtgctgatgctttcccattcaccgaggagagacttgaggagctacagaagaagctggatgagatggcgaaggggtggcctcagaagctgaagcatgagctgcatgacgagcacgaacttgtcctgctgcgccgtggtacgtaccgctgtgatggttgtaacgagatgggcagcagctggtcctacaggtgcgacgagtgtgactttgacctgcaccccaagtgcgcgttgggtgaggaaaagatgagtgaggaagcccctgctgggtatgtgtgcgagggaggcgtgtgcaggaaggcctaatctgaatgctgtgaaggatgacaataatcgtgagatggctgtgctttgatgtgaggtttttcggccgttgatgtttgtgtgttaataaatagtagttgcaggagcatatgtgtgtatgcaaaactatgtgagtattgtgtcagatcaaagtaatggttttgctgcatggtatttctggtcttaatcatatgatgttgttggcatttttttgccttatnnnnnnnnnnnnnnnnnnnnatannnnngnnnnncggccgttgatgtttgtgtgttaataaatagtagttgcaggagcatatgtgtgtatgcaaaactatgtgagtattgtgtcagatcaaagtaatggttttgctg

SEQ ID NO: 5159 - DNA, 3840 bp, Zea mays
gagggggctgcgtaggggttgcgctgcggttagtctgagggtgcgcagctaggacagctgcaggcagccgcacgtgtgtcgacgccctccccccttgcactgcgcacgcctcagtcagtggatgtgcatgtccggctttgtgtatggcgatggcagcaggatagagtagcagtagtctactcctagcctgtttgatcgtgtcggctttgcttccatcagattcatcagaccagatgggtgacatgctctgtgccgggtccgtccgctgcacgagcacgcgtgctatgcagcagctgggaacgggagaataataaaatagtaggcgtctcgcaggattgacgctggctagctttgaccgtatgtctgacgacgacgacgtccaaggctcccagcactccagcagggtatggccgccccccggcccggcacccagccaatgctctcttgccctcttgctgccactttaaaattcgctggtgatgtactcctcctcctacttgactggtcagcggataaacatcgtcagcttcgaccctgcatgttagaaaaaaaaaacgagaaaagagagagagaaatgcttgaccattttgccgtgcatgcatgcatccaccatggatggcaatggcaatggtaatgggcatcgatgagttgatccccctctgcatgctacgtactgatgcttgctgctgctgctgcttgtcgcatcacctggtgacagcttcaggtgggtggcgggggaggaccacatcgtcaacttcccaaccgtgcggctcaagcgaggcatgcccgtcaggctcaccagcaaagactagctagctagtcactacgacctgcttgtgcatgccatgcatgcagatttcagtcacgtcatatgcaatatatattggaccctggaggttgcacgtgtacagaagagaggatgcaggagctagcagatgatcggaggtatttaggcagactgaaattgaatcgaccgcgaagagtagcacactactataccacgagtatgatctgtagtacgtagtaataataagaggaatataatatcattagtgtggtagtatttacttattatactactctctcttttcggttttatttaccgtgttttagtttaaaaatgaactagcgaggttaggcaataggcgtgcatgcatggcccatcatggtcatggatatataggccttgatggttatactagtataagcagtagtgctatgtcacaagggattactgggatctgggatgatgatccacaatcccatctaaaacgaaaagagttaataaagattgttaagtttaccgctgggggcctgggactttgactactactgaaaaatgtttgtcttctcgtattgcatgctgctgtgttgtttgagggcagagagtatagtatatgctgcagaacgtgacgcacagcgtatacacggaggtattagcaaagcgtgagataaggggctggatatataggaaggcaagctgattagagaccgcctaaaataagccctacgtatcgctatcggcttggaaaatcaaatctttttttcacgtttaaactaaatatataaaaaatgctaaaatttttaatagtagagttattttgagatgtggaatatttaaaccgggatttcttatattgttatattagttagatttgaaaaaggaagtactatgtatgtgcacatgtccatggagaggtgaagagatgatgtgatagaaattgatatggatggaacggattgtcggagagtgacggaggcaatccagcccagcctttgcctttgttgcgtgatcctgccttcctgctcctccatgcatcatgctgaagctgaaaaggaagaataggaagaagaaaaaatgctgtccctctacctccacctccacgcggctggtggaaaagggtaaatgcagttgatcccttttgggacgctttcagccttttcattgaatgaagaagaacagatgagcgcagacaaggcccccagtaaactcaggttgcctgccattaccagcagcggccaatcaatccacccgctctcgcgtgtgtcaagatcctctcatggttacgcctcatatataccaaccaaccattagcatacacccacgcagatcatcccctaccaaccgggtcggttccttcggtttctgagaacacattagttcactaatgatggtgatatcgtttaaccactttcacccatgctcgattagctttggttgagtgtgtatgctatgctatgctatgcaatgccccccatgtgcctttatatatgcgtgtgttctcatgctattggaaccttcttgcttcgttctcctctcaggccaggcctctcgccaagacgattgctgctcacgccctttcggcaaagggcaaataaaacccaacgcgaatacgcacgcagtgtctgcctggcccggtcccgctggcccccgccctgcagggccccccctgcatccccagcgcgagcgacaccagcttttgggaacaccgacacagggcagagcgcatgcatgcccgcaccgccgcacgcttgggtggcctcatggtccagccacatgtgggcgtgcccgcccccttgctctgtcctgccggtctgccctgcaccaaagctgcacgcaacgaaaaaaaaaaaaaaaaaaaaatccttcaatggaaaacgctaggctctcatttccggcagcagttcggctcaaaacatggctccaggaagacatcagaaatggaggggcctcaaacatggcatgagtcgtgggcagatacagtacccaacagatcgcacgcaggcacaggatacgggaggtagcagccagcagacaacacaatcaaacagtacacagcattcaaggcctcatctaacagcttagctaggggtggtaatagatcgcgatccaaatgtttcttcacaatcctttgagaccttacttaattttagtttttaaaaatggatagaaatatagtccgaacctaatccgacccttatattccatagtgtaaatttagagatcgttacaacctctacttcccacatgtagtcctttcagaacaataacatcttcagaactaaacacatctctttcttacccatctacgaaaaaaaaatcaactcgcttgattttaccagacagttatgggaacaagcttagtaaaggctttccttctatatcaagagcaatgtaaacaaatggtataatctaaacaacagatgatgatgatgataagatcttcacgcaatcatgcaggtaatttctaaaatccagaagctattgatacagacaaaatccagttttcagcttagcgttgcagatagctccgattgacagatgtattcgatacgggacagcagcgatgaccacaaccccatcttctgccagatccttgcttaccacatgctataacagagctattgatttcagactgcgatttttcagggatgaacattgaattatgctgcattgaagtaaaaaaaaatgactaagcgaaagaggtagatatgggacagggtctgtccttctgaagttcccagtccccagctgacaaggacatttcttatatcttctgaagaactcgagtcagtaataatagtatgatagtagatgcgtgtcaaaagaatcctatgctgggcagacagcaaatgacacagcctgtatagcagtccagcaggaagcatgttcatgaaccattaccaccacatatttcatggagaccccccaaaaaaatcttcagaatatctacctagaagatgtggccataacacacccttccttgatataccacatcctataactagaagttaccttactaccctaacatcaataatggtgtgcattatctgccagct

SEQ ID NO: 5160 - DNA, 2653 bp, Zea mays
tagcgatctccccgcccccccctcgcccccccccacgcgtccgccctgcttcgctgttccctttccccgcccctacctggggcatctgcctctgaatcgcggcggctcccgaggcgccgcctggcgagcgtctaggcgccggtctacggcgacgatggaggtgtgatttggacgggagagagcgtggtggtgaggtctcggttttctcgatataggagatggcggcggcagaggcgcggggaggggagttccccgtgggcatgaaggtgctggttgtggacgacgacccgacgtgcctcgttgtgctcaagaggatgctccttgagtgccgatatgacgtgacaacatgtcctcaggctacaagagcactaactatgttgcgagagaataggcgtggttttgatgttataataagtgatgtccacatgccggatatggacggattcaggctacttgaacttgtaggccttgagatggaccttccagttatcatgatgtctgctgattcaagaacggatattgtaatgaacggaattaagcatggagcatgtgactatttaataaaacctgtcagaatggaggagctgaaaaacatctggcaacatgttattaggaaaaaatttaatgaaaacaaggaccatgagcattctggtagcctagatgacaccgatcgtaacagaccaaccaataatgataatgaatacgcttcctccgcgaatgatggaggtgatggcagctggaaatctcagagaaagaaaagagagaaagaagatgatgaaactgacctcgaaaatggtgatccttcttctacatcaaagaaaccaagagttgtttggtcagttgagcttcatcaacaatttgtgaatgcagtcaatcacctcgggatagacaaagctgtcccaaagaaaattttggaattgatgaatgtcccaggcttaaccagggaaaatgttgccagccatttgcagaaattcagactctacctgaagagaattgctcagcatcatgcaggaatacctcatccatttgttgcgcctgtatctagtgctaacgttgctccgttaggaggactggaattccaagctttggctgcttctggtcagatccctcctcaagctctggctgctttgcaggatgaactccttggtcgacctacaagcagtttggcgttgcctggaagggaccagtcatctttgcgagtggctgcaatcaaaggaaacaagcaccatgaagaaagagaaatagcatttggtcaacccatatacaagtgtcagaataatgcatatggtgcattccctcaaaacagcccagcagttggaggattgcaaccttttgcagcttggcccaataacaaagttggtatgactgattcaacaagcacattgggaaatgtgggcaattctcaaaatagcaatatgctattgcatgaattgcagcaacagccagacaccttgctgttaggaacccttcacaatattgatgccaaaccttctggtgtagttatgccatctcagtcgttaaatacattcccggctagtgagggtatctcacctaatcaaaatcccttgattataccatctcaacccccaagttttgtgtcatcaattcctccatccatgaaacatgaatctcttcttggattaccttcaacgtcaaccagtctgttgggcgggcttgatatggttaatcaagcttcaacaagtcaggctttgattagtagccatggaacaaatcttcctggtctcatgaaccgtagctcaaatgcaatcccttcaccaggaattagtaattttcaaagtggaaatattcattatgttgttaatcagaacgctatgggagttagctctaagccaccaggtgttctaaagaccgagagcactgactcactgagttgtagttatggctatattggtggtagcaccagtgtggactctggcttgttctcttctcagtccaaaaatccacagtatggtctactgcagaatcaaaatgatgttaacggcagctggtcgccttcacaagattttgatagttttggaaattctcttgggcaaggccaccctggtaccacttcatctaacttccagagttccgcccttgggaagttgcctgaccaaggacgagggagaaatcatgggtttgtcgggaaaggcacttgcattccaagccgctttgcagtggatgaggttgaatctccaactaacaacttgagccacagcattggaaacagtggagacatagtgaaccacgacatatttggatttagtggacatatgtgaaactttcttgaatttgtaagtagcgttgatcagtgagcactggaaacaaatctagtggtttgatgaatggttgctagtaatttcgtttcttttttttttcttctgtaattggtttataaagggaataatctatgtggcagcatgtggaatcttactttatagaagtttgttcagttcaaaggacttaaaattggtcagtcccttgtcatatagcttcttttctttgttctctttttctgtaattaccaattgtagcattatttttatgaccgtcgtaattcagcctagtcgatttattcccggccaaaaaaaaaaaaaaaaaaaaaaaaaaaaaaaaaaaaaaaaaaaaaaaaaaaaaaaaaaagggcggccgc

SEQ ID NO: 5161 - DNA, 1354 bp, Zea mays
gccggccgggtccatggcggtctccctcgctctcaacgacgccgcgatccagatccagccaggtatcaagtcatccttccgccgccgcgtactgcgcctatcttgcttctccggcggacgggcgtacccatcgtcctcgatcatcccccggactggatcggaacggagatccagccggacctgcggtgatcccttccttttctcggatagtatagtgagctagccaatgaagaggtaaattcgtcaggcttgtatcaagttagtagttcatggtgcctggatgagcagtagagatgctactggccgtggaaggaggagggttcttctcgtcttcagcttcggggtacagccatggccttgctctcttgctactcggacggaaagctgaggagaagcccgtcaaggcttcgccgtggaaccagtaccggctagtcgaccgggaggccgagcaggtgtaccacctgccctccgccaaggatcaggcgcctgggaaatgtgctccctttgtttgtttcggatgcacggctaatggcctcgaggtggcgtctccttccaaagcggtctccagcaatgcgctcggtaggggtacctcacaggaagaagcatcttgttcagcacacaaggcgttgacaactagtgcttccatcagtggcagtgagagacgtggctgtcttaagagcaactccaaaagggattctttggagcaccgtatagtggtgagcgagggggaagaaccacgcgagtctgtggaagaggtgcagaccttgagatctagcatagaacggaggaaagttcagtggacagatacatgtggaaaggagctttttgagataagggagtttgaaacaagcgacgagggcctgtcggatgatgatgcagaaaacgatggtttccggaaatgtgaatgtgtgattcagtagatttcatctctgcacaacaagcctgacagaaacatctcatgggaagcctgccctgctgggaaagatgtgccacggagactactttgccactgaaatgatcgacgacagtcgaaacaaaacaaacagtcatgaatcgatatcgtgctagattatttgttggttatatgcttaactagtctgctcagcagggttatagtttcgatgcccacctgtacaatatcaagatcccctttctttcttttctgtcacattttatttttctcgctttccattgtgttttcacgcccgctgtaccatatgaggctgccctgttacctcctccagggattttggatccctgacttcatgctgttccattttgttttgctcctgacgtatttagtgatggcttgttgatgcggccgtccaaattggtaacattcattcttcacttc

SEQ ID NO: 5162 - DNA, 2150 bp, Zea mays
attgtgctcgctgcgctgtgtgtttctggataataaaaaacccgccagcccccgcatcggagggccgcgcaagtgggtcaactcgcaactgaagaccaaaggcgagagccggctgcccggattccggaagcgcccaagcccccaacgcgaccgtcgctgtcgccaccgcgctcggctcgcccgcgtccacagaagccgccagggccatacgccgatgaatcctgccgcgacggcggatcccagcagctccagcacctcggcggccacgctgcggaagcggatgatctctatagacacggctcgacgaggagccgacggcgcgtcgcctgagaccgcgcccaggccagatcgggcgggtagtgataaggcgccgcaggagcgggaggaggagggctcgatggcggcctccgcgcctgcggcggcagcagcgagggagagtgacctggaggcggtgggcgagccgatgagccccgcggggcggctgttccgcgagacgcacttcaactgctacatcgtggccgtgatcgggctgggcgcggcggtggacgtcgcggcggcgcgcgcggggctggaggtcacgctcgtccgccacccacgcttctccagcgtccaggtgaatgatggtgatgcgagaaagaacgccaagccgcggtgggtgcggaccacggttaacctggatgatcacatcatcgtcccctgcctggaacccgctgccacgtcgaccaagccggaccaggccgtggaggactacctgtcctggctgtccacggcgcccatggaccactcccgcccgctctgggagttccacgtcctggacttcccgacgtccgaggccaccgccaccgttgccatccgcatgcaccactccctcggcgacggcgtctcgctgctgtcgctgctcatcgcgtgcacccgcagcgccgcggacccggcgcggctgccggagctgccgcccgcgccgcgccgcgcgagccctgtctacgccaggcagcgccccccgctttccgcgggcctcgtggcgttctcgctgtggctgtggtcctacgtcttgctcgcgtggcacacactggtggacgtcgcgtgcttcgtggccacggcgtggttcctgcgcgaccagcgcacacccttcatggccgcgtccgagggcgtcgagttccgccgcaagcgcttcgtgcaccgcacgctcagcctcgacgacgtcaagttcgtcaagaatgtcatgaagtgtactgtcaacgatgtcctgattggagtgactaacgcagggttgtcgcggtattattttcgaaaaaccagtgataccaacaacgagaggaaaaaatcgcagaatattcgtgtccgatcagctctccttgttaacattaggagaacacctggtttacatgcattggcggaaatgatggattctatcaagaacaatagggcaaaatgggggaacctgattggttacatgatactgcctttccacatagccatgcacgatgatcctcttgaatacatccgccaagggaaaaggacagctcaaaggaagaaggcttcattagaagcggttttcacgtactggagtgggaacctaatagtcaaactatttggcatgaaggctgcagcagctctctgctatggtatgttcacaaatacgaccatgtcattctcaagcatggtcggacctgctgagaaggtggagttctacggccatccaatcatctacatcgctccctctgtctacgggcatccacatgctctgactatacattaccaaagctatacgaactccatcaagcttgtcctcgcagtggatgatgctcagtttccagactctcatcagcttttggacgacttcgccgagtccctcaggctcatccgtcaggcagcttcaacaagatgacagacacaaataagagcatttttttccggtagaatgtagactgttggcgagaactcgcatagaaatgctggacaataacttatcaggaaattgatggcctggttacctgactggggactcttgaactttcaagaaatcattagaggcaaattgtaaagtgtaaagactagtatgtaatatcaatattgttcaaccaattgcggtggaattacgaaaaaaaaaaaaaaaaggaattcagcatcgactatgggtagctgtttgggct

SEQ ID NO: 5163 - DNA, 5181 bp, Zea mays
  misc_feature (3591)..(3591): n is a, c, g, or t
  misc_feature (3901)..(3901): n is a, c, g, or t
  misc_feature (4488)..(4488): n is a, c, g, or t
cattgggtacctcgaggccggccgggccgccactcgtagtcgtaggcactttcatctgtgccctctgcgttcgagatcgatctcagctggcaccgtcccagttcgccatggcggaggaccggagccccaagcccatccactgcaaagcggcggtgtgccgagccgccggcgagccactcaccatcgaggagatcgtcgtcgacccgccgaaagcgtacgagatccgcatccgggtcatctgcacctcactctgccacaccgatatcaccttctggaaagctaaggtggcaccggtgtttccaagaatactagggcatgaggcgtacggggtagtggagagcgtgggggagcacgtggagggcttcgcggcgggggacaccgtggtgccgacgttcctggggcagtgcgagcgctgcgccagctgcgcgtcggagcacagcaacgtgtgcgacgcggtgccgttcgtcatcggccccgggatgcggcgcgacggcaccacccggttccgggacgcgcgggggagcccgctgcacgacctcctcgccgtctccagcttcagcgagtacaccgtcgtggacgtgaaccaggtggtcaaggtcgaccccgccgtgccgcccaagctcgcctgcctcctcagctgcggcgccggcaccggggtaggagcagcgtggaggtctgccaaggtggagccaggatccactgttgcaatctttggcctcggatctgtcggtttggcggtggtccaaggcgcgaaaatgtgtggcgcatccaagatcatcggcgttgatctcaaccctgacaaggaggaagtagggagatcgttcggcgtcacagacttcgtcaatccatcgcagctggacaagcgttccgtcgtagaggtgatcgttgagatgaccggcggcggcgtggactacagcttcgagtgcatcggcgtgccgtcggtgatgaccgacgccttcagatgcaccaagatggggaagggcaagacgatcgtgctggggctggggagggacagcgacgaggtgtgcctgccgtcgctggagctgctgttcgggaggtgcgtcatggggtcgctcttcggcgggctgaagcccaagacccacatccccgtcctcgccaagaaatgcatggacaaggagctgcagctggacgcgctggtcacgcatgagcttggactgcaggacatcaacaaggccttcgacctgctcctgcaggggaaaagtctgcgctgcatcctctggatggacaaggacaagtaacggaaggagaggggcggccggaccaatccttcctgtctctgaataaatttgccctgttttttcagcgaggcgtcgctgaaagctggtgttagcggcgaccaagactatctgttcctgaaagccggtgtatcagtatcgtttcgttgtctgaactgattaaatcctaatatcgatagattagactctccccagcaaccgctttgtcccctgaataaagtgattcatcatctcttttttacatctagcaaaaaaaaaaaaaaaatccctacaagacagcgaaggttaccgtctgtccccttgtgtcgtggtttcggaaatctgacacacgggattatattgattcatgcccggattatagtacagtgtagtactgatcgtagaattacagtagattgtgttataaattgtgtgctcgtgtgtagaaaaaataaagagtttcccttttatactttaagggattaaccttacatccgagagagaaacttggttgtcatgacgtgccattcatgggccctatgtgcagtcggactcttggcgtggcaccattcgccatttctgtccctgtagcgagttcgcagctgacacctcgtgcggtagtacgtggcaggtcccatgggtcagtctcggggcatcttcacacgtggcatggaccctcctttcgtcacgatccttgcgtcactccccatcatgttgctggccatcttccggtatgggtgttatctcgtccctttcaataaatgggtcactgtttggacttccgatgccacagtgctaccttgactaggctcgaatggccccacagggcagtgtgagtatccatgcgaccgtacattaagatgtacagtcgtggctgatggagacttcccgtcacgccctcgatgtgtcgtacacacctctcgatgtggcctagggatggcgcgccttatcgccgctgacgtgggccagcgacgcggggggtcgggtctgcgcctcacagacttgctcgtcaattgtttggacgtccgctccacctcatagtcttgctcgttagcgacttggtcgtccgctccgcctcgcagactcactcgacagggacttggttgtccgcctcgcctcgcagacttgctcggcggggaccgagtcatcagtctcgcctcgcaaacttgcttggtgggacttggtcgtccgtctcgcttcgcagacttgcttggcaaacggaccgaaagaggttatgagccttaccttgggtaccccgttcctacgtacccgatagcagcccccgagctttcgggccactcattggagtcgcacggaggcttatgctcggtggcctatacgcttaggtgtgtgcaagcgcatctgctagatgtagcccccgagccctcgtgtgatccatgtcgattgcttagggggcttacttggtgataatacatgcgattgacgccacacgctgggcgtgggtccatttccctttagtgagggtggaacgctcggatgcatgtaaacgcatctgttagatgtagcccttgagcccctgagtaatccatgtggattgcttgggtttacttcgtgataatacaatttagggatgggcccttcatgcgattgatgccacgtgctgggcataggtccatttccctttggtgagggcggaatgcttgggtgcgtgcaagcgcatctgttagatgtagcgcccaagtccccgagtaagccatgtggattgcttgggagtttacttggtgataatgcagtttagggacgagcccttcctgcgatggtcgtcacacgctgagtgtgagtccacggttcccttgtatttatcccgggggagtgacccctttgagcaggtcgtcgcttcgtcatcctcccttgccgggcgtgtccattcgccatctaatgcacgcatctccctttcgaaggatatgttaggagctcctcctttgaagggaggatctccccgaccgactgggtctacgcggggaaggaggtcgttgagctacaaacgggttatccaagtaagatacgactatcccttcacagtgcttggactcggtgagcagtcccactagggggctcgacccactgtgggcatcttattaagtccttccttattctatctcgtattggccctcctgtcaatctggtcggtcggatggggccgtggccaccccgtcagccgcgttgccacaggagaatgtgaggtacgaccttagatgtggaatcaagcaaatgacctatgggccggtcacatgacttgcgaatctctaggagcttgctcagcccacccctcactctacgcgagggagttggaagtgaattttggtttttacctggagtgaggcagtttatggtngcgttgcggtaaaaataggagttatcatggcttcgctcggcgtggctggcttgacgagacgcgaaacgacccactcaccgtgtcatgcacaagtgacgtgatggtgcggtaaaccaccctatccgttactgacgcctttccccgtgcgctccttggtgcttcgtctgaggcgatgcgaaccttgcaaaacgtataatcttcctcgcggcgcacgaggcgggggataccgatgcggtaggatctcctgtgttgtccgcgagggtccacctttcaagcaccgctttgcttccctgttcctatgtatagatangacacagaggcattcggggtcggttccgcttactgtgctttctcgcccgagcatctgacgcccctttcccttggagatcttctcgcgcccttgtgccaacctcccttctgtgctcttcttccctggcctcatggacacctttcccttgtgctccgctaccagggaacgcctcgaggacctggagaggaatgggttcctccctcctgagtcagtcttcggttggcatctagaggagggcggtgctttagcgccgcgtgatggtgaggtcgtggtgctggcctccttctatgagcgcatctttgggcttcccctgcaccccttcgtgcggggtttgctcttctactacggttgggtgctgaaaacccttcatctgaacatgatccttcacatagtgtgcttcatcacgttgtgaaaggtctacctcggcgtggagccccactggaagttgtgggtcgcgggtgatgtgtgcgaccatctctcccctccaacgccatctgaggcgcttttggctgatcggttgtgggtgttgcctaggcacgtggagcgtgtggtcttcgaaggtgcatacttccacgagatcaacgacnccgtgatcgcgaagggatatgccatcgaacggagtgaggaggaactagacgccatcgatgaataggttcgtcttcacactcagtcgcttgcaagtcgggtcgatgtgaagctcctcctgaccagttccttgagtctggaagcttccggcgatgatccgcctacccccgcctagattgtgctttcccttttagatgtaatgaacttttgagtaacttgcaagacgcttccatatgtgacattatttccgtctagggtgttggaaggtgttcgttccctagcccatgagtaggacatgtcgaattggttagcaggtgctgattgcatgtgaggaaaggagggaaaatcgcttagggatagaatttcctcaggttttcgatgttccatgcgttgttcaggagattctcatcgccatccttgagtcagtaagccctcgatcgtagagcctaggcaataatgaaaggaccctcccaaggtgatgagagcttatgcttgtccttggtggccatcactctcctcaaaactaggtcgtcgacgttgaatgacctacctcacacttgtctatcgtggtaccacagtagatcttgctggtatttcgcggagcgtatcacgacctcatctcatatctcgtcaaggagatcgatagagagttgcgcatctgtcgttgcccactcgccttcgtaggcctcagttcg

SEQ ID NO: 5164 - DNA, 1833 bp, Zea mays
atatctctttctatagccagattctccccacagccagattttcagaaaagctcgtcagaaaaaaagctgaaccaaacaggcccattacccgcccgagatttcgcgctcttcacccaaaatttccccatctccgacctcccccttcctctccccctgccgctccccgcgccgagaaggagaaccccagccgccgcgcagcgcgccgcccatggcctcctcgtcggagaacgcggctgtgccgccggaggaggagccccaggccccgccgccgccggacacagagcctaccgaggcggcgcccggcgaggcggaggatgagccgcaaaccctagagcgggcgcaggagctcttcgacaggggttccaaggccatcgaggatgaggacttcgtcgacgccgtagactgtctcagccgagcgctcgagatcagggcttcacattatggagagctcgcaccggagtgtgccagcacatacttcaaatatggatgtgccctgctatacaaagctcaggaggagagtgatgttttgggaaatgttcccaagagcttgccaaatgaagactcagtgaagagtacagctactaaagatgacagtggaacctcaaaggtctctggtaccgatgcggaggatgctgcgtcatcagaaaaagttgatgctgaagaaggtcacaactcaaatggcaaaaatcaggagaatgggaatggtgaagttgagaaagatgatgacgacgtcgacgatgatgagaagatgggagatgaagaggataatgatttggatctttcttggaaaatgttggacattgctagggcaatagttgagaagagccaagataacactatggagaaagtaaaaatatattctgctcttgctgaagtggcaacggaaagagaggacatggacaactcactcagtgactatatgaaagctttatccatgttggagcatttggttgagcctgaccatcgtcgagttgtggaattaaacttccgcatttgtttggtttatgaactagtttccaagatcggagaagcaatttcatactgtgcaaaagcaatttcgctatgcaagtcacgcatacagagcctgaaaagttccaaggatgctttgttggctggtatagatggtgatgcatctgctgctgaagctgaaggaggctcagaaaaatctgccattgaaaaagagctagagcagcttactagcatattgcctgatcttgagaagaagcttgaggacctgtctgaagcaaacccaagcgctgacatggatgagatggtgaaggcaatcgtgtccagggtaactgatgtgatgccaaaagctgcatcttttacttcttcccagatggcaacctcaagcaatggattcgactcctcggttatgtctacggcagcgacaaccggaagctctggaagcaccgtgactgaccttggggttgtaggcagaggcgtcaaacgagctagcatcaagccgatctctgctgaacctgctgctaagaaacctgcacttgattcaccatctcaacaaggtgacagcagcatcaactctgaggttgttcctgcaacgcagactggagacgagtcagtatctaagtaaattacaatttcattagccctactgtaatgttaacttgctggaacatattagctgctatgtaaacgcttaagaagggactgctggggccatagactcatcgtgagctgaccattgaaatgttaaattgctgagatcatcatggcggtaaatcatgtctgctatatcaaatatgcttggtgagatgtgtaaaaaaaaaaaaaaaagatgtatctgaccgtagtagctcaaaaaaaaaaaaaaaa

SEQ ID NO: 5165 - DNA, 2259 bp, Zea mays
tttcattttctcggaatttccgtggatccatcatttggatttgagtccactattggtttttcatcaaacgcaaattttttgtccgccgatttttgaaaccacagcgcaatgccttcgacagtatttgttatataagagcggaaacaaatctaaacaggtgatttttattcgacctgaacagtgtgaagaagaacccttcgtgggccgctgcctccttttaaccagtggagagcgcgtcgtatacgggagaccgtccgtgcctggctggccgcccgctcatcttggtggtccgaccggcctgactctcttctccttcctgcgcgctgggtccatattgtcggtgtccgaggccggcccgggctcggttcggccacgccccaccagccagccagccagggacccgtcgctgccctctggcgatgagggatattacgggtctgccctgaccaccgcccacgcgcagccaggggtagaaacgaccgcgtcaccgtatttgacccctcaccgtcccacaccagtgtcggcgagtccctcctgtgcctcgtcctccccctttcccctccgagtccagcccggcgccacccactcagccgcggatccgaggcgcagatccgatccggcgatggcgtccacggcggcgaggcggctgcgggagctgcaggcgcagacggggaacaagacctgcgtggactgcgcgcagcggaacccgcagtgggcgagcgtctcctatggggtgttcatgtgcctcgagtgctcgggcaagcaccggggcctcggcgtgcacatcagcttcgtgcgctcggtcaccatggactcctggaccgaggcgcagctccgcaagatggaggccggtggcaacgaccgactcaacgccttcctcacagctcgcggcgttcctaaggagacgccccacgtcgccaagtacaactccaacgccgcagccgcctaccgcgaccgcatcgccgcgctcgctgagggaaagccgtggactgacccgcccgtggtcaaggagacgcccggatctggcgcccccgcccccgctaggaagccgcccgtgcacacatctgccgcctccggcggcggcgggtgggacgactgggacgacgattttcggccggacatgaggcggaatcagtcggttggatcgttcgccgccgcgggtgcgcagtcagggaggcagccgccgaggtccaaatcaacacaggacatgtacacgaggcagcaactggaggcgtcggcggctaataaggaggactttttcgccaggaggatggcggagaacgagtccaagcctgacgggatcccgccatcccagggcggcaagtacgttgggttcggatccagcccaccgccgtcggctaacaggaacggcggtgctgcccagggcgatgtcatgcaggttgtctctcagggatttggacgcctttcattagttgcagcatctgctgcccagtctgctgccagtgctgtccaagttggcacaaaagaaatccaatcaaagatgagggatgggggctatgaccagaaggtgaatgaaactgtcagtgttgttgccaataaaactgcagagattggaagcaggacttgggggatcatgagaggagttatggcgctggcctcacaaaaggtagaggaatatgccaaggaaggaggagtgggtggctggggagaggattggcaacacagcgagcagaaaagtgagccttaccaaaggtttgagcatgagaccaacggcaacagttggaattcctcccaaaattcttcatcgaagaacaattccagttcttgggacgactgggacgacccaggcaagaaagatgagcctgcgaaaccgcaccagagcagtgactcctgggctggctgggatgatgggaaggatgatggttttgatagccctagttacaacaatcacagcacctccaacaaggggagcaaccaaaacgggacatccggtggcacattttggacagaaggcggcttccgctgaaaccagtctcttttccatagagctatactttcagagttgttacatgccaggaaacgtgagggtccagtggttggtattatttgggatacttaaacagtcgggtgaaagggtttgtgtgttttgtaccatgtctacaactgttattatatctagtgagatatatttctgtggtcagatgccattcaacactgcccaaatgactaagaaatgtcgatttgaaactgtaatttactcgactttgtcgcaaaaaatccgcccaccccgccggaggg

SEQ ID NO: 5166 - DNA, 2048 bp, Zea mays
cattgggtacctcgaggccggccgggagggcgttctaccgcgacgggggtcgctctataaagaccttggttgggcaccccgaggccggccgggatcgtcctccgctccagcagctgccacagagacatcagagagcggtcctccttgtgagtctgagctgaagaggaggaggaggaggaggagaagcagcagcgcagccggaggagggagagcgaagatgcgccgcgtcgcgctgttgctcgtcgccgccgtgtgcgcgctggcggcgccggctgccgcggtcgtcactgacggtcttctcccgaacggcaacttcgaggatggcccgcccaagtcggcgctggtgaacggcacggtggtgtcgggcgcccacgccatcccgcggtgggagacgtccggcttcgtggagtacatcgagtcggggcacaagcagggggacatgctgctggtggtgccgcagggcgcgcacgcggtgcggctgggcaacgaggcgtcgatccggcagcgcctggccgtggcgcgcggcgcctactacgccatcacgttcagcgcggcgcggacgtgcgcgcaggcggagcggctgaacgtgtcggtgagccccgagtggggcgtgctcccgatgcagaccatctacggcagcaacggctgggactcgtacgcctgggcattcaaggcgaagatggacgcggtgacgctggtcatccacaacccgggcgtggaggaggacccggcctgcggcccgctcatcgacggcgtcgccatccgtgcgctgtacccgcccgcgctcgccaggcgggcggggggaaacctgctcaagaacggcgggttcgaggagggcccctacttcctgcccggcgcgtcctggggcgtgctcgtcccgcccaacatcgaggacgaccactcgccgctccccgcctggatgatcgtctcgtccaaggccgtcaagtacgtggacgccgcgcacttcgccgtgccccagggcgcgcgcgccgtcgagctggtgggcggccgggagagcgcgctcgtgcaggaggtccgcaccgtgcctgggtggacctaccgcctcgccttcgccgtgggggactcgggcgacggctgcgcgggctccatggccgccgaggcctacgcggcgcgcgccaccggtcaaggtgccctaccagtccaggggcaccggaggctacaagcgcgccgtgctggacttcacggccatcgccaaccgcacccgcgtcgtcttccagagcaccttctaccacatgaagcccgacggcacgctctgcggcccgctcgtcgacgacgcctcgctcgtcggcctgcgcaagaagaagcccgcgcgccgcctcatgcagctcctgtaagcgctgcttccacgtgcactacgcccggacggaccgcgcaagcgatggtgtaatacggctggtatgtgttttttggtttggtgtgtgcgtgcgtggtatacgcgtgccgtgcgcgccctgtggctgtggctgcagtggcgtcgcgttgggtgttttcttgttgtgacgaagaaaaaagggtatgggttggggtggtccgctggccggcgcaccggggttttaatcaacttatattaacctgatgaaggtgaaggtgaaggtgacacgggattaatggcaaaaatgctcctagtactatttttgtaatatctcgtcccccggcggctcctcgctcagatctccacctccacgtcgggcgtccagaccttgttgttttcgatcgtagtccagttccaggttgttgatgccgttccggtggaggaagtttttccccccccgacgaagaagccaaccgctcatatatactcgaactggactctattgtaatccggacaggacgatcaagcatctcctagcgttttacggctccttgtaggggcaggtttggtttggcgctttgagtccaggatcagttcagatttgatgttttccatactcagaagccgccagcacttttttttttgcaatatgaccctgaattagcctttcaagtttgggaaaaaaaaaaaaaaaaaaaaaaaaaaaaaaaaaaaa

SEQ ID NO: 5167 - DNA, 1674 bp, Zea mays
cattgggtacctcgaggccggccgggatcaaacctccgccccagcaccggcccgggattcacccgggtcccccgaggcccgccgccggcacaccgcacacgcacgcacgaacgcgctcccaccccctcccgccgccaccgccgccaaaaccccggcccgactcggcgtcctccgccaacctcctcctgggcagcgccggcgggggatatggcatcggaggacgtggtgggcaagagcaggggcgacacggccgtcaccaccatcgtcaacctggcggaggaggccaagctcgcgcgcgagggggtcaaggcgcccggccaccagatcctcaccatctgcaagtcgctcgtcgccggcggcgtagcaggcggagtgtctcgtactgctgttgctccacttgaacgattgaaaatattgcttcaggttcaaaatccgcacagcatcaagtacaatggtactgttcagggtctcaagtatatctggagaacagagggcctccgtggacttttcaagggcaatggtaccaattgtgcaaggattgttccaaattctgccgtgaagttttttagctacgagcaggcgtcaaagggaattctgtgggcctaccgtcaacagactggtgaagaggatgctcagcttactccgctcttgcgccttggagctggagcatgtgctggtatcatagctatgtctgctacttacccgatggatatggttaggggaaggatcactgttcagacagacaaatctccctaccagtaccgtggtatgtttcatgcactgggtacagtctaccgtgaagaaggctttcgtgctctatacaaagggtggcttccatctgtaatcggagttgttccatatgttggtctcaacttcgctgtatatgagtccctcaaagactggctactccagacaaattcatttggccttgcaaatgacaacgagctgcacgtagttacaaggcttgggtgtggagctgtggcgggaaccattggccagactgttgcatacccgcttgatgtcatcaggagaagaatgcagatggttggttggagccatgctgactctattgttactgggcaaggcaaagaagcactccagtacaatggcatgatcgatgcattcaggaagactgttcgtcatgaaggcgttggtgctctgtacaagggtcttgtgccgaactcagtcaaggtggtgccctcaattgccattgcatttgtgacttacgaggttgtgaaggatgtgctaggagtagagatgaggatatcagactgaggatggtcgttttcaactgctatttttgtaggctttgggaagttgtgttttttttttgtaggcagggcgggtagaagggtatgaccgcggctccattcagcatcaggccctctcagcccatgttggatatatatcatatatcctgccactggcttcagtcaggtcctagaattgttgctgggtcgtgcaaaaagtaataagtcggctgtaaagcttattaagcatctgcctaactcatcaaaagaaatctattccttattgatgatgtaccgagattttcgaacttaaagcggtactacgtgctgctaacagttgattaatgatttttctttgttgctggtgatttttcaaaaaaaaaaaaaaaaaaaaaaaaaaaaaaaaaaaaaaaaaaactcgtgc

SEQ ID NO: 5168 - DNA, 4012 bp, Zea mays
ctcatgaacaccaacaactagtgtagtgtgtagttgtgtgcacgctggcttggtccccgtagcagagaaccccacccccataaaagctcctctccattggccgaacgccgagagcaccactccctccctccggctcccaaccccagcacagcgcagcagcagtcctctctcctctcactctactcctccagctccccgcccccctcccgagcccgcaggtcactcccaggtttcaaatccgccaccttttggacacacaccacacttgcctacccccagagctgagctagctagctgctctctctctctcttttcacctaagcgagaacagagcccaagaggcctcaaaagaaccactgcacttcctccgcatagctcgtcgccctctctctcctatcagtcctcccagctccagctaccacagcagccctctcgcttaaaggaggagggagaagagggcggggcgagcaatgtcggagcagcagcagccattgccgcagcctcggagcagcatgcgggaggctctggagaaggaggacaaggagaaggcggcggctgctgcggcggccaaggagaaggcggccgtccccaagaacggcaacggcaacggcggcaagaatggcggcggcgccggcagcggcaacggcggagcgcccccgcagtccggggaggagacggcccgcgagatccaggtggtcagggaggcgtaccgccgcgagacggccgcgccggcctacgtcatacccgaggagccgccggccgtggtcgagctcgtcggctggtacatctacggcttctgctcctacttcatcacccacctgctgctgccggtcctcttcccggccatcatcacgcaggtcgccttccccaactccgacttcacgcccgaccccaagtacaccctcaagggcgtcacctgctccgtccacgagatgtccatgtaccagaggcttaccaagcactccattgtgatcgatggatcccggatgtcaccattgggctggagtggactgtcgtgggcaatcggcatcctcatcgtggcgccgctcctcacccagaccgctcaccatctcgaccgtggccagtaccagtcgctgatcctcattgccgccacgtccttcgggtccttcttctgcctgctaacaggcttcttcaagacggtctgggtgttcctgttctacatcctcttcatcgctggctcgatcatcgtcgctgaggcggtgcacacccgcaaccttgggctgatgatccgtggcctggctgcgcatgactcgggcaagcaccttgtccttcgccgccgcgctgctgccagccagctcagcctgtactgcactgccataggaggcattggagctgccctcatggcagctttcatgtaccacatgctgcggcgcactgaccagctcactggcctctgggtcgtgtccatcttctgtggccttatctggttcatcggcatctgccatggcctcttcacaaacaggcccagcagctcgtcacccaccaccgcattcgagcccaacttcttcaccaagctcagctacagcatgaccctcctccgttacccgcaggccattggcagcctggttgcggtgttcctgtcctctttcgccacaatgtgcatcttcaccagcggcacgctctatgctatcggtggtgtctgcatcaagccggtgctcgtgcttgcgctatggatcctctactttctgttccccttgatctcgctcccgctcctccacccgatccagatcataatccgcgcggacgccgtgcgcatgcagctgctcgggttcataatctgcctgttcgtgtccggtgccgggttctacttcaagagccacaggtggagggctgcccacatcatcgtcatcgccctggtccagagcaccgccaatggcatactgtacgcgttcggccgcatcctgctcctcgatgcctcgccgccggggaaggagggtgcgttctcggtctggtacgcgtttgttcgtgtcaccggtgccatgatcggcttcgctgcctcctccgctggccctgggcgcgcgggagggtcctttgctgctgcgttcctcgggagcttcctgggcatcatcgtgctgatcttcggcaacgtcagcaacatcggggcgctgaaggcggccgggcacctcaaggggatggacgacgagaagaggatgggcggtctcgggatggagaagggcgagggcatgggtagcgccgtcgctgattctggcgagagcagggggagggtatgatgatgactattcgtgacagtgaattcctgggaggtgggggagaaaaggattgcgtcctgtggaggttgtgcttgtgagaaggatttgttctctcttttttttcttgtttctttggccgtgtttcagtgacactgttgatggatcccagtgcttcgcccgtttgatgcatcatggtggtggtggtgatgatggatgacatagtggtagggggtgtgtgctagttgttaatgtgttatttattcttttgcttgcaagacaattgtaactgatgatcgttagatcatatggttcttccttcgttcttcacccgcccccaaagtctcttgcagtaaagcttcattcatgattcagactgtgtccgtgtggggaaaaaaatgtgatggtggcattgtgtagacagaagtaaaacatctgtaaactcacttgtagcgatcattctgttctctctgatgccagatgctcgtatgcatttgaatccgccgcagtgccgacctgtgttcagagcttcaaaattcatgccatgtttctaaacgctcttgaactgtgaagtatacgatgaaacgcctaacgacgagtgatttcaacagcatgcgacgtaatttcttctgactttatccgctcgtcattttctttctttcatgctacgagcatctgacacagactgcgctgtgctgcccttttagcacaacaacaagcccacaacggctataaaacagcatcatgacgccattgcatttcttttttgtttttcccgcttgccttgtcctcacctgtcacctgccccgagaatctctggcctcatcagaattcagaagtcaagagacgactccgaccaaaaagaaaaaaaaatgcatccagtttacgtcggaactaaaaccaacacggatgctggtatagatcaatggtgcatacatacagtgcacggtggcaagcaagtagactgaggtctacggagacgtctacatccaggccgcctcgacgtccacgccccggcgcagtgcaggtctcgccgtcagcgctacggcatgtaatcccatttctaatctggcttgtgctgcgaagggtcaactgaactgccagttcgtcatctcagaggcaagcgaaccgagcacggttttctcatggcctctgcagaactccagtggccgtcaagaaggaagaaaccggcgctgaatgaattttatggagggggcgtgctggatggataaggtgcagtactagcagttggaatttgaggtgcacaaggtgcgacttctttttttttctctctctctccctttgcacgcgctaataattcagttgctgatgctttttgatggggtggtggtggttggacttttggactctcgatgatgtgtttacaaagactaaaaaagtacaggttaagagggctagtggcaccataatatggtgtgttctttcctttgtcaatgggggaaaaagagagtgtgatgtggtaggttttgtgatcttgggtgggtgggtgggatggtatggtctccggaaagcgtttactttggacactttttcaggttgatgttttgagcaaatatgctgatgcgaactcttagcttgtccatctgttcttcaaccgcattcaaactcctgcacctaccatccctttagacatactactatgtaagccgtaaccacatctacattaaatccactagaaactacagcaaacaagccgtggagcaagaaaaaatctggagaatgttcctatccaccacgtggtctaagttgtatccactggatca

SEQ ID NO: 5169 - DNA, 3011 bp, Zea mays
  misc_feature (1335)..(1335): n is a, c, g, or t
ttttttttttttttgcaagaaatgtatcattggaattacaaacatccgccgcgtcaataatatacagaaagagtcgaaagacaagtaccctcaacagctcaaggccacctagcaccaccaccaactgcagaacagagtgatcgactaaaacatcggccactcgactgtaaaaagttatcttatctactaaagacaattgtctggtggggtcatctctgtacaactttatatatccggggcagcaaaacaaacaggaaagatgacaagtcgcccgatcagtctcctctgaactagttccacagctccatcgaaaaacctgagcaacatgctctctatttcaagccagcaacttcagcctggcttggtattgagcggcagctcatcgctcaatttctaacatgcctagttataaatttttacaggtctctcgaatgaatgccggttctgattagccgtgtgtgccttcctaggagccgtgtccggatgttccagtccaagatactgctcccaagctccatacatgtttctctggaattttagggctacagtatctgaatcttcaaaatagtcaggacgaccgagtgaaatgtatgcaaacttccactttgagaaatcctcatctggaaccttaagctttttctgtatacgttctttgatagaagatagggtctcatcctcacgaataaccataaaaaaaggttctccaaagttctgaacttgcgtttggttttgagtgtcttttgtaaaatgatatacatgaatcaaacgatcgaaggggccaagatttttctcctcctctggaacctcctctgcacgcagtgtccagtactgatcattgatgttttcaatcttttcatttggtgcaaataccttgtatatcttgtgataaaagacctcaagtaatcttagctcagcattggtatgagacaactcaaccttcgttttgatatcattcagcacatcgccaacagtgctgttttttggtaatcttatactgtgaactgacacctcatcttttgtggcatgatggtaggtaacttttaatgccttcagcgcttgtaattctggaagtggtatgtccaatacttcatagtacagaatatcagaagtctggttataatgaatcagcatatccagtagacgttcaacgcctctgtactttattggttgaggcttaggctgctgcgaataacaattatgtgatgtaagacgaattttcgatgggtcatccacgccaagtttttcagctactttttccacgacttgatcatatgtgaaaatctttgacatctcaaggcaaaattcgtcgtccttgggcttctcccaatgaacggnaagtgcaccacctgccggttacgtcccggccccgccggcctcggggcgtcaggaaatcgatatcggtctgcactatctggttttgaaggcttttgaaaacaaattatatccccgtcttcaagctggcaagatcgaaacagaagcctgttgtcaatgtattcacacatcacattgggctcgaacttaatttcctcataaagttcaatatcatcatcctgtgaaaaacctgccaacatccttaacttcagcagaatgtcctgtggtcttcctgaagcctttacaaagagcctaccaacataccgcagctgttccttttcaggttcatagagtttgaagaaaagaaatatatcttctctagtcttgtcgggaagaggaagaggtttaaggtccagtccaagttcaacttccaagaacagtttcagttctgcgttgtgggccttgttcaccagttcctttagctgcccaacagtatgtgcttcgtcttgaggacacaatggcctgttaggtcggtaggtatcgttttgtcgcttggcccacagccaaaatcgttgaaactgtgtaggaataccaaactcttttgctacctcctccttgaattgagcaaaggtcatctgtttctggatacggaagcttgggactttattcatgatcaacaagatcaaaatatatgtctttccctatctgagcttttaagtcatcatcccttgcaaccttgattatagtatagaggtgtgcctccgctttttccttcttccgacgttccttctcttcacggtcattttctaatctaatccgaagatgctccgctatatctttctcatccacattacatataattttgtccttgtcactttcacgaatgtacacaagcatgtatgcatttgaatatttagtaaacttgaatggggtgttgtttaagccaggatttgtctgaggtagctcctcctcaccaccatattgctcttctagtgccctctttgcatcttcttttgtcacacgctcatcatcaaacttgaaccattgatcagaaagtgtaggtcgtatgaaagcatagtaatgtccaccatgaacaccaccactatggacaagaacactgtgaagggtataaagattacgcacattcctgtcagcatcaggagataaatattttccattatctctatcaagatccaattggagtggaaattcataacgatcgtttatcttcaccatcgtgtcacgcatgaaatcatactcaaaacgttttagctgaagttgcaaaacaggagggaagtcgataaaaagaactcctttttttgcatcctgcaggccatgtttgtcggcatgatacttgttgtcaccttccagacgctccacttctacgtacttatcaaatgaagcatagacatcctgacaacctttgacatcaagctggagatcatagaaggattcctttcttgttgatttgaaatccacattgatacactcaatgtagttcatgtggtgcccttcaaacaattgttgtatcgttccctccacaacagttccagatgtcaaaccttcatcttatcttccaacttctcggaaagaactctgttcaattcttgtacatcatgttgcataaatgaatcatgcatatcccacccaaacgattttgtgagctcctttgtagagacactgctgtcattatactgcaa

SEQ ID NO: 5170 - DNA, 1440 bp, Zea mays
  misc_feature (2)..(2): n is a, c, g, or t
  misc_feature (730)..(730): n is a, c, g, or t
anttaaccctcactaaagggaacaaaagctggagctccaccgcggtggcggccgctctagaactagtggatcccccgggctgcaggaattcgcacgagaccattacctagaacatcctaatcgaaaagaggtaacccaaagaacagagagaaattactgaagcatgagcgcggagctgaagagggactacgagatcggcgaggagatcgggcgcggccgcttcggggtggtccaccgctgcacgtcccgcgccaccggggaggccttcgccgtgaagtccgtggaccggtcgcggctgggcgacgacctggaccgcgagctcgcgcagctggagccgaagctggcgcagctcgccggcgcgggcaacccgggcgtggtgcaggtgcacgcggcgtacgaggacgaggcgtggacgcacgtggtcatggacctgtgcccgggcccggacctgctggagtgggtgggccgccgccgcggcgcgcccgtgccggagcccgtggcggccgccatcgtcgcgcaggtcgcgcaggcgctcgcgctctgccaccgccgcggcgtcgcccaccgcgacgtgaagcccgagaacatcctcatcgacgccgacgacgacgccgggagcgacgaggaggaccaggccgaggcggcgccgcgcgcgcgcctggcggacttcgggtcggcggcgtgggtgggcgccggtgggctcgggcgcgccgagggccttgtggggacngccccactacgtggcgcccgaggtggtggccggcggcgagtacggcgccaaggcggacgtgtggagcgccggcgtggtgatgtacgcgctgctctccggcggcgcgctccccttcggcggcgacagcgccgcggaggtgctggcggccgtgctgcgcggcagcgcgcgcttcccgcccaggctcttcggcggggtgtcgcccgccgccaaggacctgatgcggcgcatgatctgccgcgacgagtggaggaggttcgccgccgagcaagtcctcgctcacccgtggatcgtgagtggcggaggagcccgggcaatggagcggccaacctgaggaggaatccagacggacgtgtattgccgtagagcactcaggcacggcaagcaatcccggacgttatgtatgaggtttttgtacgtacgtacgtagtagtgtacggtagctgctgccagctgcagagcagatcgatcggcaaaagaagctttataggcttgtggttttcctttgccccccgggtttttggggacgctctttacctagcggagcagagagcacccgttttccgatgtgctggttttcctagctggatgtacatacactgaccgtcttttgtacagatggagtgtgctgttggatacataaataaaaaaaaaccaagcctttgtactcaaaaaaaaaaaaaaaaaaaaaaactcgagggggggcccggtac

SEQ ID NO: 5171 - DNA, 2123 bp, Zea mays
attaccgttgcaacgcacgaggcttgcagctatgagtcactgacgaagtgacgaggcatgccatgcgtgtgggcacgaagaaacaaactggtccaagacgactcttggactccctctccacttctccggccagagacgctggacggctggtgtctcgtttaattcaaacacgactcgtcgtcgggacttcgtgcgcagccgccacccgcacggccgcacgttctgccagcccagtatcccagatccagtccactactccactcccgttcccccaagtctatcagccaaagcatcgcccgccgatggcgtctccgccccactcagtcgaggtccggacccccggcgactcgccgcggcccaccgccgctctcctctccccctccgtggccgcaccccagccctccaacgcctcccgcctcctgctcctcctcaccgcggccgtcgccgccgctacggccttcgtcctgctccgcccgcccatcaccgtcgtgaccgcggcgtccgccaccgcgcggccgctctccaagctctccaagcccgtggtgctgctcatttcctcggacggcttccgcttcgggtaccagtacaaggcccccctcccgcacatccgccgcctcttcgccaatggcacatccgccgccgagggcctgatccccgtcttccccacgctcaccttccccaaccactactccatcgtcaccggcctctacccctcctcccacggcatcatcaacaactacttccccgatcccatctcgggggactacttcaccatgaaaaaccacgatcccaagtggtggctcggggagccgctctgggccaccgctgccgcccagggggtcctgtctgccacattcttctggccgggttcggaggttacgaagggttcctggaactgccccgacaagtactgccgccactacaatggctcggtgccgtttgaggagagggtcgacaccatccttggctattttgatctcccgcctaaccaaatgccacagttcatgacgctgtactttgaggatcctgatcaccaggggcaccaggtgggtcctgacgatccctcaatcaccgatgcggtcgtacatatagatgagatgctcgggaggctcattgctggtttggaggctaggggaatgtttgaggatgtgaacattatattggtaggtgaccatggtatggttgggacctgcgataggaagcttgtgtttctcgaagagttggctccatggatcgagttgaagtcagattgggttctgtcagtgacgccattgctggcaatcaggccgccagatggtgtgtcgccagctgaggttgtggccaagatgaatgaggggcttggatctgggaaggtgaagaatggggaatatttgaaaatgtacttaaaagaggagttgcctactcgcctgcattattcagagagttacaggatcccaccaatcatcgggctggttggggaagggtataagatcgagatgaagcgctccaagagaaatgagtgtggaggagcccatgggtacgacaatgccttcttctcaatgaggaccatatttgccgcacatggacctcgttttcagggtggtagaactgtgccctcatttgagaatgcggagatatacaatgtcatggcttccattctcaatttgaagcctgctccaaacaatggttcagcttctttccctggcacgattctgttgccgaacaaatgatcatggattggttttgtaggagtaagggcacatggatgtatgatggtgttctcatttggttattgtattgtacctcttaaattagacttctgccacatcactgtatctgagcaaaaatgctgctagtagagagttgcttctctctagtgacaacatttggaaacatgtttcacatcaaacgtttggctgctcaattgtttcataggagttcattcgagctccatgttttctccttaattgactgatgctcctgttgataacatatgcatttattcacgtctcatggtactcattttaaccattgtattacattatggtatactttgttttgttcttatatcgtttatcacctgtcaatgaaccagacaattgtaatatctgttatttcataaatacagatgcactcaattaaca

SEQ ID NO: 5172 - DNA, 1661 bp, Zea mays
cattgggtacctcccggccggccttgggaaaacgcaacagcgcactcgcccccctcgcttaaaagctgtagctcacacgagccgtgccactgcgagggaaggagggagagaaaaaggggagcccgatccaatcccaatcccctcccgccgcgtcacatcgccgccgtcctcgtgccccgttacctctaaaaccctagcggggagccgccgagccggggatgaagatccagtgcaacgcgtgcggggccgcggaggcgcgggtgctgtgctgcgcggacgaggccgcgctctgcgtcgcctgcgacgaggaggtgcacgccgccaacaagctcgccgggaagcaccagcgggtgccgctcctgacggacgccgccgccgctgccgccgcagcggcgccggccgtgcccaagtgcgacatctgtcaggaggcttctggatacttcttctgcctagaggaccgtgcactactttgtagagactgtgatgttgctatacacacagtgaattcctttgtttcagtacatcagagattcctgctaactggagttcaggtgggtcttgatcctgctgatccagttccacctattgctgaaaagcatgttaatgctgctggtggatcagtaaatcaaccagtgagacatcagccaaggagaagcccgacagttcaattttcagttgaagggagtgcttctgttcctaccaaaaatgtaacaaatggagattgttcaaggcagaattttgtcccaacagccaggggagaagtggttgattggactatgaataatagtacaattcggtcagtagaatctccgcctaagtacatttcagaggaaagccccacacttctgcaatctagccagaccacaacagtcttctccaaccaaattaatggcaacagtgatggggcctaccacttgtcattctcaggtggtaatgtgacagacagcctaccagattggcccgtggatgagttcttcagtaactcagaatatggtccaaactttggcttctccgagaatggttcttctaagggtgataacgctaagctggggggcgctggtggatctccacaatgccgtttggctgaaggctcagttgctgaggaactattagggcaggtgcctggattgatcaccgatgaatatatgagccgagtacctgagaattcatggacagtgcctgaggttccctctccaccaacagcctcggggctcaactggcacgggaatttgtgtttccctgcgtatgacagcaccatgttgttcctgaaattacctcccttcagaactccgaaagtcacttcaccgtaccttccagtttcaagcgccggagaagagagtactgagaggcgacaagaagatcactagacaccactgtccggtctaggctatcttgagaaaggcttcttggtgggctaaatgacgaaagaaaatatccaggactgagtggtcattcaaacatcaactgagctatccagtagccaggttttaagtgtgttgtaatgcttcaatgtgtttcattttccaaagacctgagcttcgcttgtgatttgttccgagctgtacggtgtcgattttgtgtatataatataatataacgaaataaagggtacccagtatgagtatgatcattccgaaataaaaaaaagacagagtatgagg

SEQ ID NO: 5173 - DNA, 2252 bp, Zea mays
cattgggtacctcgaggccggccggggagtggtctgagcatgctttaagaaatgaagaagaccgccacggcccgcccgctagccgttggcagccttctgccccgcaccctccgcgtcgaacaccagatccggccaccgctccacctctgtccatctcacgccaacgcccactggcgtcctcgttcctccctgccggggagcggcggagagcttttcacctcgtcttagggacctctggcttccttccccctgccggcgatcggcggagatccgctgttctaacatcgtctcccgctgctgacttgtgaacaaggcagcagcatggttcagtttggaaacatgtcatcaaagaagatagagttggatcacaaggacatggtccatgattctgctatcgactactatggcaagcgccttgccactgcctcctcagactctaccgtgaagatcatcaacattggcgcggcaaatgccccatcccaggtccttgcaacgcttagtggccactatggtcctgtgtggcgtgttgcttgggcccatccaaagtatggcgctatccttgcttcgtgcagttatgatggccgtgtcattatttggaaagaggatgcacgaggcaattggtctcaagtccatgtgttcagtgacaacaagtcatctgtcaactccattgcatgggctccgtatgaggttgggctttgccttgcctgtgcatcttcaggtggaagaatatccatcttgacgatgcgagctgatgggggttgggatactgcaaccattgagcgagcacatcctgttggtgcgactgccatatcctgggctcctgcaacagattcaatagctggcacaggggagtttgtttacaagcttgtctcaggagggtttgactcggttgttaaggtctggggattcaacaatggtagctggaagctggagagtgctcttatctctgacatgcacacagattgtgtgagggatgtcgcgtgggcaccagttttgggattggccaaatcgaccattgccagcgcttcacaagacgggaaggttgtcatctggaccaggggaaaggatggagacaagtgggagcggaagctcatgcgtgactttggttcccctgtctggagggtgtcctggtccttgactgggaacatattatccatagctgctggtgggaacaatataaccctctggaaggaagggtcagatgggcaatgggaggaggtgatgaaggttgaaacataggatgtccgtcaagttttctgaagataaagtgtgttttactagtgtttcctgcagatccatgtttcgacgtggacaaagtttgccgttgtgcttcgacagaacatccaattcacttattttggtactttctgacgaggcaattatactcttggatggatcccgtgcgctttagagtggtaatttcagatcggtgagcctgtttagttctgtatatcctcaacttcttttttggtggaacatcagagctgctgcaagtaatgttatctaataagaactgtagcaatttctattgctgtttgtgctgcggctactgtagcgctgctctggtgcgcgccatcgtttgagttttattgatttgttgtgcaagcataacatagcaagattctataattcgttccgcgtgtcattccggtgatagatttatgacatttgaggaagggatatgtttgtaataaaaaagtaattcaatctagaacatataaaaaacaggcgctccattagtccctgttcgattattctcattacacatagattagatatgattgaaaaaaaattaagaataaatttaacttacttggtatttaaatccaaccgatctcacccaatgcacatagattgaaagctaaccgaacaagccatactagaacatggacgtcttaacgggcgccctattaggacaaatggttattgtagagaaatttaattaattctttatcaaaagtttcttgttcataaaactactaagaaataaatcttagaaaatggaacaaacatgaaccagggagatggtaaatattagaagcggtaagcctagctaagctattagcctacacaaaccttgccaattttttccatgtttagttccaatgtcaactttctatctacctaacagtttggtaaatttgaaaaggaagtaaaatatacatatatgtagaatacgaagagaaagcaagaaacttcgaggccagcaaagttgttcctgcaattccagcacttgtagctcatatggcagc

SEQ ID NO: 5174 - DNA, 4921 bp, Zea mays
cctgtaattaaaagttccttggattttgattggcatgttgtgccgcgatcttcactcagtttttttggtttgctttttgcaccatgaactgcatgctttagagataacctactgaaatttaaatatcagaccgtgttcggtccttatggttaatgaatatttggatcagcatggtagatactttgtgtgcagaatgtaccatagttgaaaacactgtgtttcacatagtttatggtagtgtagtaactcctgtcgctcgagtgttccccctgaagataaatcttgtgaaatgatgccaaatgcggtcactaactctactaaagatgtcttggaggccgatgacacaactttcaataatgaatttccgatcaagttagatcagctcggtgatgatcctgttatttcccttggaaacatgcttgttgaacttatccagcacgaggattcttgttctggggattcaaatggcccgaccagtacatataagctgctcctactgaaggaaagcatttccaaggagattgaaaagactgaactcgagattgattcattggaaggcgaacttaaatctgtgaatactgaggctgcaactactcttgaaggttctcccacaggggtgacgcatacagaaaatctttcaccctctagtgggacatccaaggttcctggaagtgtggagatctgtgatacatctgatatgataaaagaaccaggggagctcattggttctcctaaggtacctgtggtgcagtatgatgatgtcaaaagtgctgatatgatggaaattgaaacagctccagttcataatgcaaaaacagttccttcagaagctggtgctatatctcctgtagtcgctgagggtaaggcctgtgcagctgctgatcttagctcattgaaagcttctgaagaagctgggtctcaaaatgatattgacaatggcaggctggaaacttcttcacgccaagctaatgctgattccatgaaattagaaattagtgatgacctaccagtgaagaaatggacataccatgatcataagtctgatttgctcagttctgtcacatctgcaaatagtgctatagccaaagaaattaatgaagtgctatttaaatcattgcctgctgatacacctcgccttgatttgtttgcatcaagtcatcttctgagccaaaggaagagtgatttgattgtcaaagaaaggcttggagtatgtaaaaccaggctgaggttgaaagagcagatgcttacaatgaagttcaaggcatattgtcacttgtggaaagacgtccaactattttctgcaaataaacagcgttcaaagtctaataagcgcactgatcagagcaaccgaacatcacaaattggatctcagaggcaacgctcctctaaccgctcgcgattaaccatgcctgctggtaatttaagtacattctcaactccagaaatgtcagatgttgcaatgaggttgttttcagagttcaaaattaagcggtgcagaaattacttgaaaatgcctgcactgattattgatgagaaagagaaggagtggttgaagcttatgaacaagaatggtctagttgaggatcctgttttagttgagaaggaacgggtgatgataaatccgtggactcaagaagaaaagaaaatttttatggagttgcttgctaaatttggcaaggatttctccaaaatcgccagtttcattacacataaatctactgcagactgtgtggagttctactataagcatcataaatcagatagcttccgagaagtgaagaaactattggaccttcgtcaacagcaacccaccagcaattttcttggagcgaaatctggacataaatggaatcctgagtcaaatgctgcttctcttgatatgcttggggtagcatcagtagtagcagcccatggccttgaatatgcaaaacaagtggagaaaatttctgcgaaatccctcatccggactgcatatgggcccaatgtgacttccgtggctaataaatcttctgataaggagtgcattgaccatgtgcctttgcacgagagagaatctgtagcagctgatgtactagcaggcatatgtggcactctctctcctgatggaatgggctcatgcattactagttctgctgatcctggacagaagattagcatgaaaagagtggagcatgtcttgtcccaagaaaatgacaaaaccgttgaggaggaagacacactctctgatcaagagtgtgaagttgacccagttgattggaatgacgacgagaagtcaattttcattgaggctatgaataactacggaaaggattttgctcggatctcgtcatgtgtgaagagcaagtcatatgaacaatgcaaagtgttctttagtaaggctcggaaatcactcggtttggatttgatccatcaaggggcagccgatgttagtatgccagctagtgataccaatggagggaagagcgatactgatgaggcctgcgctgtggaaatggattcagctatctgtagcacacagtcatgttcaaagattgcgatggatgtttgtcctactgaaggagccattggagggcctaactctgttataatctctaagcaggcagaagcatatatatcaaatgggtgcaatgctgatgttaaaattgaggaagatgagaaggtagctgataaaaattgcagcattgttgatgctaagaggtccagtgatgctactcacgaagctggtcctattgacatcaattgcccaggaagcacagataagctgcaaggaactgatgatgtcgttgacctagtaaacatgcatagtaatagtggcatcagctcttcagctaagcatgcagtggccattcactcggaaatgagatccactttacattctgtagaggtccttcaaacagacaaaggtgaaggtactggtactgatttgtcctgggtggaagaatgttcacaccatgctctggataacacaccaatgaaaaatggaaattctggtgccccggctttcttggcttcagatagtggtatcaaggacaatgttcgcatctcaaacataactgctgcttccaccgttagtcctgcattcacttcaagttatcagcattctgtacctggagatatgcccctgccaaaaccaaagccacttgttaccccgcttaccccaaaggatttaatgcctgtgcagttcagttcagtgcttcctgaccccactgcaattcgtttcgagggcatagcctcaataactacgcccaacttcgaggacactggcaacagagtcagtggtgctctaggggctaaagagatgagcaagtacccagcttttagagacccatctggtaatcagcaaagcaccttgttttgtaatattgatggttatatgaatcatcgtctgacaactgaattaccatttttttctgaaagaactgcgagtggcactgtgaatacttcacaggcggatcggttgacccaaacaaaattgcagaatggcaggtccagcagcttgtgccttcaaaacaattccgatggcattcaatggcccagagaccacgaaggaggactggaaggctctttgaggccttgctctcgcaatacaagctccgagggtgatgagcaacaaaagcggcctggtgatgtcaagttgtttggacagattctcagccatcagtcaaccctgcagagttctggcttgtcttgcaatggtaacaagagcaagcctccctcaccaaagatcgacacatctgtgagatccatgaacaatccaatggaccgtgtggtttgttcttccaggcctggcaccactccacatctgggtctggaggaaagattggcaaggtgctatggtcatctggatggtagcacggcacagcccgagccactgctcgtgatggcaaagcgccagcggtccttggccggcgtacagttttactcggctaagaacggcacgcttggtgtgttaccagattaccaacaaccttcgacgcagccacagcaatcagatcccaagcgtgtggaaaggttgtctgatccgcagaagaggaacgtgctggaactcatctcgggtttccagcagcccggcagagtcgcccgtttcgggggtgctggcatcctcgtaagcggcaacgtctcggaccctgtggctgctgctctcaaggctcagtatggtcccggttctaagattatgggcagcgacgtggatccttggacggacataggaagcaggtagcgccgtagcagctctactgcttctgttgctccttgtaccatatatttagttttggtgtaacttgaatgaaatcatcagaatatgagatgtggggggtggggagtgaatggctttcctgcccatactatctgtaggcttttggccagtagcagtcgggtttcgctgtttactggcattaacatttttactctttcttctgcagctccatacccttttggtatagcttgacatgccagcagtggcacagtgccgtaggttccctaaaggtgaactagatgtttgtcagcatggtttgattttgccagcctatgcagaaaacctcacttggtctttgtaatgtggtaatgccatgtatcagtatcctagtctgatggagttttggttgagacagttctcaaaaaaagctggttcatcttctgtttctgcttataacattgcaacgtggtgcgtttgctgagatggcatcggcacgtcgttctggacttgtcgcttttgagttttgacttcgttgcacgtgagtttctggctggaggtggatttccttgggcggcgcctgcggaccgggatcgcttttcggtttcacgagcttcttttggcgtcggctcggctctttccgtagcgtgtagggctgtggtggtccttctccagcagcagcagctacgccagccatgacctagatgccttgctcgctttgatctcatc

SEQ ID NO: 5175 - DNA, 2248 bp, Zea mays
gcacgagaccattacctagaacatcctaatcaaaaaccgcccaccgcaggccgcaagtcttgcggctcctgcccggcctagcccggccattgctccttcccagttccgagttccgacctcccgagcccgaagccagaccacgccttaaaccccgtcaatccgagatccgacggcccagatctttcgtctctgcctctccccgtctgttccccatcttcccgtccccccgccatgtcgccgccggctgccggcgcggccgccaactccggcgatgggacgcctccgtcgccgcgcgagctctacaccatcccggcatcatccggttggttccggtgggacgggatccacgagacggagcggcgggcgctgccggagttcttcggaggggcaggcggcgctgggttcgggacggcgacgcggaacccgcggatctaccgcgagtaccgcgacttcatcatcgccaaataccgggaggacccggcgcgccgcctcactttcaccgaggtccgcagggcgcttgtcggggacgtcacgctcctccggaagctctttgccttcctcgactcctccggcctcatcaacttctcggcctcctcgtcctcggtccccgcgtcgcggcagcaggaggtgggggtcgtcgtggaggcgcccgtgggtctgcaggtgacgccgcgtcctccagcgtcctacttcgccgaagagaagcgtgtagcggcgggcggggagaaggagaacgaattccggttgccgccgctgacctcctacagtgatgttttcggggaatgggcacctgggaaggcgcctatatgcggtttttgcggtgaggagtgcaatggtgcggatgttgagacgctgcaggatggttttaaagtatgttcaaaatgttccaaaagcaataatgataatatcaaggaagaggcgaataaatgtcctggtgacaaaaaagagaatatggaaaatcatgcttccagtgcatggacagacactgagacgttactccttttagaaggagtcctaaaacatggagatgattgggatcttatcgctcagcatgtccgcacaaagaataaatcagaatgcatagcaatgcttattcaattaccttttggcgaacatatgctgggcacaataaatggtaaattcgttagcaggctccacataaaccaggcagatgatggaaaaacgaaccagcacattatggagtcttcaagtcactcaaccgaaatggctgatggcatgcagattgatggaagtgaagatagtgctgataaatcagttgaagaatatcctacaaaacgcagacgattgtttttttcaatggatgctaccacttcattgatggagcagttagctatcctgaccacagcagctagcccagatgttgctgctgctgctgctgatgccgcaattaaagcatttggcaatgaaaacccgcaagcaaggaaagcctttcgcctcaacgagcaagaatataagactaaggcttttgcttctaatcatgtccaacagattgaccacaaagttggcaataaggatacggcgatgcatggccagagtggttctgataagcaggaaaagaagttcattgctagcgcatatcaattgagggcagctgttgctactgctgttggtgtagctgctgcccgtgctaaaatgcttgcagaccaggaggagcgagaaatggagctcctaatggcgtctgtaattgaaactcagctaagaaagatgcaatacaagatcaaacactttgaggagctagattcactcatggatcaagagtacaccgctatacagcaaatgaagggatccctcatgaatgaatggataaaggtccttgagcatgcattccgggctggagtgtctctaccgagagatgaattgctcaccaaactgttgctgaactagccgcccatcccatgaggacctggctgtagtcgagtagttctctgatatgcgtcacccccttgactgttgctggtagatagcttcctgcgtgggtgcgtctgtaaaggtgccgattgtgctttcgatttctcagaattttggggatcagaacaacccttcgtaactctttgccctgttgtaccaactaggttagatggcaaaattgctgaaattttcttgtagctgttgacatgtatggtttcgttcgtatggatgtgaaaatggtacctcagttttggagtttcaaaaaaaaaaaaaaaaaaaaaggccccccgcgtccgccctcgcgtccgcccaccgtccg

SEQ ID NO: 5176 - DNA, 1212 bp, Zea mays
tctggcaaaacggcactgctctgttgtttttgttaagacactagacaaagacagcttctcagatgctgaaagcataaatgcgttcgtccacccgcgcgcccgacttgagaaagcacggcatcccaatttggtccaatttgttggagctgtcacgcaaaatgtcccgatgatgattgtttcagagtaccatcaaaagggtgatttagccagttatattgagatgaaaggtcggctgaagcctcacaaagctataagatttgctcttgacattgcgaggggactgaattatctccatgagtgcaagcctgagccaatcattcatggaaatttgtcgccaaaaaacatcattcgggacgatgaaggacaacttaaggtggctggttttggatcactgagtttgagtaaagtttctgaagataaagtacaaatggctcagccagttacaaaatttgacaatgtatacatcgctcccgaggtctacaaaaacgaaccatttgacagaagtgtagatgtatttgcatttggtctcattctttatgagatgattgaaggagctcctgcttttcacccaaagccacaagaggaagcagctaagatgatttgcttagaggggctgagaccaccattcaagaataaaccgaaatactaccccagtgatgtgaaagagttgatacaagaatgctgggatccgatgccttccgtcaggccaacattcgcggagataattgtgcgcctgaacaagatacatgcgagctgtgctaagcagggtagctggagagacaccttcaagcttccatggaaacaaactggagagagataattgtaaagccccgcgaggctgccgtgtcaagatttcgccccttcccttcagcaagtgtgagtaaacacgagtcaagaaacgtacagagttacaaacagaaaggcaaagttcctatttagttcaggtttcagaccacagtttgtgctttgtagcctgtatgactgtatctaggcttatgccaccggcccaatttctcttgagctatcttcatccaaacgggaacaacagagtattaatcagtattctgaacattcagggcgtgcctattccttttgaactcctacgtgaacgttgtaaattctgcacgatttcctttcgtgccttttgtgtacgttgtgctaaagagaaccagaggcatacgcatatcccgagaaaaaaaaaaaaaaaaaaaa

SEQ ID NO: 5177 - DNA, 1473 bp, Zea mays
ccggccgggccggggaaacaattgggtccctcgaggccggaaagaaacgttcctgaaaaaaaaaaaacaaaaacacgaagaactccaccgtttcatcctctttccccaatccgttcaacgacggcttcaggaacccttcctccggcggccgccacaacgagcctcgggcaccgcaaagcaaatcctatcctatcagtcgaatcgtgcgtctcgtcgagcctcgatcctatccccgccacgccgatccctcgtcggtcgtccgaatctggtggactatctccatcgccgggcgttcatttttggcccggtgagccgggggtggggggtgggtatttggtgccgtgagttgctgctcccgcccgtcgatgcttggttagcagaagagacggcggcggtaccatgttgcagtgcctggatggagtgaagcagctccttggcgtgctcctcaagtgctgccacatcgacctcaagcagcccaacggcctagaggatccggaggtgctcgctagggagaccgtgtttagcgtgagcgaggtcgaggcattgtatgagctgttcaagaagatcagcagtgctgtgattgatgatgggctgatcaacaaggaggagtttcagttggcgctgttcaagactaataagaaggaaagtttgtttgctgatcgggtatttgacttatttgatacaaaacacaatgggattcttggatttgaagaatttgctcgggcgctctcagtatttcatcccaacgctcccttggatgagaagattgagttttcattccaactttatgacctcaagcaacaaggcttcattgaaagacaggaggtaaagcaaatggttgttgctacacttgcggagtcaggaatgaatcttttagatgaggtcatagagagcatcattgataagacttttgaggaggcagacacaaagcatgatgggaaaattgacaaagaagaatggcgcaatttagtagtgaggcatccctctttattgaagaacatgacactacaatatctcaaggacatcaccactacatttccgagctttgtcttccattctcaggtcgatgatacctgaatttctgaaaactaatgaatgtcagaaggtggactgcttgctttgccaagcaaactttcagtgcctgtttgatggttcaaaaatctcatcgtcctgaaggcatcaaatcatcgtttgttgttaataatctttttccttgttttgtatttggaattcttgctggattctgtgtgaatcctcttctattttccctctccattgttcctttattctatttcggttttgatggccagtacttgagtcagttaatgtgtacaaagttgcgtctgatgctgcctgtcattgaattgtatggcatgtgaggaagatttaaattgtatattcaacttttgtggtcatgatagttgcacatatttttaccatcctttccaaaaaaaaaaaaataatcgcggccgc

SEQ ID NO: 5178 - DNA, 1086 bp, Zea mays
attggggcccccgcgggccgggccggtgtctcaaacacacgagagctcctcttgtcttgctcagcaatcatatcgcacgagatactattgactccaagtacagaccagtccagtactgttgtacggcctggttccgtggaacagagatgggcaagcaaaagattgtgctcaagttgcccctggatgacgagaggaagaggaggaaggccttcaaggcagctgtgggaatgaacggtgtgacgtccgccacgatggagggcgacaagatcaccgtcgtcggcgatggagtcgaccccatcacgctcacaaccatccttcggcgcagcctcggctacgcggagctgctcagcgtcagctccggcgacgacaagaagaagggcgacgggtacggctacgggagcgccggtggcatgatgtacggtggcggcggatacggtggtggcaaagagggcaaggagagcaaagagagcagcggcggcaagagcagtggcggcggtgggggctacggcggccattaccaggcgatgccgtcggtctcgtaccctgccgcctaccagcagtacaacgccatgccgccctaccccgccgcctactcctatcctgcagcatacccgcagcaagaacaggaccctggatgcagcatcatgtgaaaaaacatcctacaagttaatctgaggagttggttgaaggtggccgaacacatggagatcagattaacatggttgggttcgtccggacaagatgatccatgctgccttgagctgtgcaacagaggatgatgatccaggatgtgatgggcattatcatccgtgtaattatgtacagggttggccagcaaagttgacggattgatctgttggagttggaggtgttggtggaatgggaggcagagctgttccgcaagattatgattcaagtgcagactaagtagcagcaccgatgtttcctttttgtttctttcgtttttggtaaagttgtagtgtttgttgaagaaaaggattgcaataaaattagtgtttatacactaaaaaaaaaaaatggacgaaaaaaaaaaaaaaaacccaaaaaaaaaaaaaaaaagcggcc

SEQ ID NO: 5179 - DNA, 2671 bp, Zea mays
cccgccgggtaacctcggggcaagaagcgatttacgcatatgccccctccagccatcagtagccacgggctatcctgcgcccaccacctgccctcctgccttcgtcctgcccggcgcctctgccctcctccgggctccacagagtgaaaaagtctcctcttttcctcttcctctcccgttgccaggcatggggttggcctagttgtgcccgttgagcactagcagcctccttgaaacctccagatctgtgcctccaaggcccccgttcctcggcaacaagccgtccagatggacaccgccgcgcccctgcaactgaaagcctgcgccggcgacgccgcggagaagctgctgctcgccgtcgcagccgagggtcctatctgtggtgtgccagacttcaagatgaggggaaagaagagtgatgagctcgaacctgtcgatgctggcgatgaagatgatgatggtggtgacgatggggacgaggatggtgactttggggaggagggtgaagaggacgtctcagaaggggagggatatgacaacccaaagggcaatgagaccaagaagcaaagaggtgatcctgaggaaaatggtgaggaagatgaggaagaaccagaagatcaggagggtggcggcgacgacgatgatgacgacgatgacgatgatgagaacggggatgacgaggacgacgacaatggggatgacgatgaggagggtgtagatgaagaagacgatgaccaggacgaggatgaggaggaagatgatgatgaagactcgctccagcccccaaagaagaggaagaagtgaagatcttctgccgctttagttaccgtgcgctgagttctgcctggcttttcgtcatatcctcgcatttcaactttcccatagagagttaagaaggatccacacgttcagcagcacgtgtgggcttgtaggagctttatgatttgaggcaattagggacaactcttatgtcattgttgcttgcttctgtggagtcgaacagatgtttcgctaacataattcgacttgagtgacgaaagcctccagattgaatatgccttctcttttatctcgtatggaatcattgatgcagccctggttgatagcgttccttcaataaatgaattatattggcatcatgacagcttcatgtgaattgcacgtttatactgtgcgttcaaatctcaactaatgtatgactgatcggaacaaatattattgcattatttgtagcattttgaaatagaatggttatgatggtcgatgtgaacttcgcctatggtgcctcgatattgcaggtctcttagtgtctgttggaagtaccggtttttatgaaagtggtttgtaaaaactgaggtgctcgtgcgttgctacggtttctatatattagatagaaagactatttaaatgcaatacatgttaaaacacatctaaatctttataatgagcttccaaaaagttccgagcgacttgccaggatggtgatggcatggtgcacgagtcctcacgccttaaggccttgcatgcatgatagaaggtggtgccacgatatgtgcatgtgccagcatatctctccgcctcaatcaaacatccacattcttcgatctaacctaactaatcccaatgctcaacgaatatacaactttatgagatagcaaactgtgtgatatgtgcgataaataaagttcgtacaggtaacagattcaccaacagatgtctgttataagggcttctctttctttgaatgaacgatgtaattgcatgagatcatactcatctatttctttgttttgtctgccatggtttcttttttctggttttttattaactgcacaatttaaagttcagtatggaatggcgaaagattaaaggtgagctcgtagaggtataagctcatttcgagcctagtgattgtgtagtctctgagaaaatcaacccaagagaccctccaatcatggacacccggaagtagaacactgcaacccttatgaaggccatggcgatatgtgacaactctaaaaataagctaaagtaataactccggcaattaaacaacacaatgttttttttcttaattcaggtatgattcaaatggcaaaattaatcatcatctcagtgtgaagttatttacaaattttaacacaagcaaagtatagtttaaactttaaaggaacaacactgatccagggcattactacattgactacagagcatccaccacaactcacatatatttttgttttcttaggatatggcacaaacaaatcaacatctattctttccattacccaacagagaactttgcatttgggaatacaaaagataagatatgtgatgcaatctaactctatctacgagagggtagaaatatataaattatagctaaacatactttcaatgagtacacttttctaacaattagttgcacatgtcaatagctttattgctgctacatcatatgccaacttttaagaaccttctcccatcctggccatcatcacaaaaataataatcaagcacaattttgttatgaaattgattgctgaaaatagaggggactacaaatctaacttcaatgtaaacaaaccaagctaacccacacaaaaaccacaaaaactgtaggtatgtcggcgacaactaaaccaataccatggagtccctgaagtgggtg

SEQ ID NO: 5180 - DNA, 1260 bp, Zea mays
cctcgaggccggccgggccgttccgtctcattctcatccccgacccccgcaccgcggcgccggcccggggccccggcggcgaccttgcggcctccgctgcgctctgactggtgcgcgcttagacgaggagctgcggcggccaagaccaatcgaccatggctacccgtatccagtttgagaacaactgtgaaattggtgttttctccaagctgacaaatgcttactgtctggtagcgattggagggtcagagaacttctacagtgcctttgaggctgagcttgcagatgccatccctgtggtcaagacctctattggtggcactagaataataggccgactttgtgttggttaatatctgaaatttggttttgctatttggcttattctctacttgttttcaccttccttttcactttgtttgcccaggaaacaagaatggacttctattgccacatactacaaccgaccaagagcttcagcatctgaggaattgcttgcctgatcaagtggtggttcagcgcattgatgagaggttatctgcccttggcaattgcatagcctgcaatgaccatgttgcacttacgcaccctgaccttgacaaggagactgaggagttcattgcagatgtgcttggggtcgaggtgtttaggcagactattgctggaaatatccttgtggggagttactgcgccttctctaacaggggtggtttggttcatccccatacatccgttgaagaccttgacgagctctccacgctcctccaagttcctcttgtcgcaggaactgtgaacagaggaagcgaggtcattgctgcaggcatgacagtgaacgactggactgccttttgtggctcggacacgacagccaccgagctctcagtcatcgaaagcgtcttcaagctgagagaagggcagcccactgcgattgtggaggacatgaggaagtctctgatagacagttacgtgtaactggggggccagcaaatgtgggtcagagtttgcctttgctaaaagatgtattgcaagctatagtcgaattatcagtagcacaacataaccctctgatatgttcgtggtttatccgtggtttctgaattgtagacttctgcgttgaagctcgtgctactgtttgttttccattgtttgttcacaccaacagctatatgcagatacatggcttctcagtgttacgccggcagatgaataagcttggggaaaaaaaggatgttatcttgaaaaaaaaaaaaaaaaaaaaaa

SEQ ID NO: 5181 - DNA, 2328 bp, Zea mays
acacgatcgatcgggccaggcccgcattctatgggatccgtctctccactctcttctctaccgaacacaatctcatccgtcttcctcttccccatcagccgccctaccgagtcttcgcacgcacgacgcttcgtcaggatcgattcgcgagacctctcctgtccggatcgaggttcatggtttacatatgcgcgtttgtttactgatgcataccacgaccacctgatccggatgtcaggacagatctcctgctttaatcgagtccagttcatgtatgaactctcccttttcctggcacgttgctagatgtaaaagggtgttccgggatttaagagaaccacccacgcatccatgtctgaccagcaaaggcactacggcagctacgagctcctcccggctcacccagatttgcggtgcctggtctgcacgcggccgttcactcttgacgccgaggtcaccgacagcttggaagctttagccatatgcagggagtgcaagacgacggtgcttagtgacagcaacagggacgacactccccgagccaaccgacagagaagatggcgaaggcagcaaagctccatcaggggggtctcggtgttctcgcagctgatcaacctagctagacaacagggtcatgaggcggacactgattctccgacggttccccgccgccacacatcctatagttctacgccgagccggtcccagagggggcacacttccgacgacgagagcgatggtctgagctacgccgattccgtgtttggtgagatcgagtcgaacatcagttttggtgatgagggtggggaatctgacacttctcttgatcgccacaccatggttgggagggaaattggcatacagcttgacaatgagagctacatgaacacagatacagatattgatcctatgaatgctggagtataccagtgggactcagacgatcctgaagacgatgaagatgaggagtcagaggagtctggtttggatgaaggagatgacaccatgcaggagcgccggcagcagtggcatgatatcgccccgagtggattgaatgagcaggaatctgaaggtgctgcatggacttggagaacagttggaagccaagacataaacaggactgatctgagagtcgacatggaaggacgggaaatcaggagactttttattgggaaccccggagattatgttgatgcaagacagtttgaaatgcttctcgagcaattcgctgatgaggataacaattccagaagaggagctccacctgcagcggcatcttccatcgaaaatctttcgtctgtggtcatctccaaaggctatgagataaacggtggtgtaacctgtccagtctgcaaagatgacatgcctatcaccactgtagcaaaacagctaccatgcatgcatctctatcattcatcttgcatcttgccatggcttaattctaggaacacatgcccagtttgtcgttacgagcttcctacagatgactcggaatatgagaggtccaagcatgccgcggtcaatgaaggaggtatccatggggtggagcgtacccatccgcaggaagttgttgaagaaacttatgaacctgaggttgatggaggttccaatacaggcggtgatacaatgaatgagactaatacacatgaacagcatactgcacagcagccaaatggagcacatgggcgtcatagatggctgtttattgcagcagctccagttgtaagtcttgtcagtttagctctagttttgtgcttcaccaatcctgctggcaatgttaggaggcaattgtgccgtaggtcccagactaccactacggcacatgtagacacaagaagaagttggtggtctatgttctaagtaaccagtgtttacttgctgatgctgaatttctgtgtgatggcgtgtgcttgttgccacttgccagtgttgtgtcaattatgtatgaaaaggttctagataaatttgaagtgcaaactgtgtgtgccaaccaaggtgttcttgtaaccaagttcagacagttcagcaaaacaaatactgatgattgctgctgttcattgatattttatatgtttggttgctcaggttgtaacttcaagcatgtaactaacactctgccttaaagtttacccatgcattcatcagtaagtgcctaaaatatctcttgtgcatgatgcacattgtagtttgactggtaatttgcaggtcctatgaaacttctgctttaaattaaatatgtttaactctccactccaagtcatccatgccttaaacaatctattgctgatctgatatttgtcttatgttcaaaaatatctgttcaaacca

SEQ ID NO: 5182 - DNA, 2900 bp, Zea mays
aattcggcacgaggctccaatcccggcacccacccttagctcccggacgggcggttcagaacacaaaatcaacggaccaccggaacaggaagcaacagcagcggggcgcgggtgccgtacccttcactcattccgcccctgaaagtgaaacgtacccagatctacaagctactccactcgacttccataaataccactcctgcgattccacccggcagttggaccggccgttgttgctttgcgtcttcgccaaaaacagaataagcctgtcttgctccgatcaggcgtgttcttaggcttcgctgcccctaccgcgtcttcgccgggatcggtccatggccggcgccgagcgcgcggaggcggtcgcgctggaacaagggctcctcgatccggaggaatccaaccaagtagtatacactggagatggatcagtcgacttttctggaaatcctgttgtcaaggaaagaacgggtagatggaaggcatgtccattcatattaggtaatgaatgctgtgaacgactggcctactatggcatctccacaaaccttgttacttacttgacaaaaaaactgcatgctggcaatgcctctgctgctagcagtgtgactacatggtcgggaacttgctacttaactccacttattggagcaatcctggctgatgcatactgggggaggtactggacaatcgcaacattttccacagtatacttcatcgggatgacactgctgactctttcagcatcagttcctatgctcatgcctccatcttgtgaaggatccttttgcccagcagcaagcccttttcagtatactgtcttttttcttggtctttatctgattgccctgggtactggtggaattaagccgtgtgtctcatcctttggagcggatcaatttgatgatacagatccagctgagcgaatccagaagggctctttcttcaattggttttatttttcaataaacattggtgctctcatatcaagcagctttctggtttgggtgcaagacaatgtaggatggggactggggtttggcattccgactgtattcatggggctggcaatcataagcttcttctctggtacatcactttataggttccaaaaaccaggaggtagtccaattacacgagtatgtcaggtgattgttgcctctttgcgcaagtggaatgtgcctgtcccagaggatagctctctcttgtatgagctacctaatggggtatcaacaattgaggggagtcggcaaatagagcacacagatgaactcagatgtttagataaggctgctacagttaccgaagttgatgtgaaaacggctgacttcaacaacccatggcggatatgcactgtcacccaggtggaagaactgaagatactagtaaggatgttccctgtctgggcaacaacaatagtgttttctgctgtatatgctcagatgtcaacaatgtttgtggaacaagggatggtgcttgacccatccttgggctctttcaagatccctccagcttcactatctactttcgacaccctaagtgtcatcatatgtgtcccgatgtatgattacatcgtggttccgatagccaggagattcactggcaacgagaggggctttacagagttgcagaggatgggtattggcctggtaatttccatcatggctatgtcagtcgccgcagtcctcgaaatcaagcggctagcagttgccagggaagcacacctggtggatcagaatgtcccggtcccactgagcatattctggcaaatccctcagtatttcctgattggtctagcggagattttcacattcattggggcgctcgagttcttctatgaccagtcaccagacgccatgaggagcctctgcagcgcgcttaatcttctcactactgcgtttgggaactatctcagcacgttcattttgacaatggttgcgtactttactacgaggggaggtaaccctgggtggattcctgacaacttgaacgaaggccatcttgattacttcttcttgctcatcgctggcatcagttttctgaacctgattgtttatgtcctctgtgctggcaaatacaagagcaagaaggcagcttgagttgtgaaggccaggggctggatggcgtgctgcgcgccatgttatggtggacacttcagttcaaaatctgtatatatgtttcccgcattaaccaccctagctgaagcaaccatctgcaattgttgcaaagtttatattcttcattgtgctggactaagttgattatacattcgtgcttctactttgtgtatgtatatatctgacctaaagttgctgaacatagacaatttcacttgcctctggtatccaaaaaaataattgtcttttaacctagatatgtgaggtcacgttttaacttttgtacgtagagtaaagcatcaatgtgctggttgaacaccaggagggcttggggcgtagttatggagtgtttggttggacgtggatggaaggggtggtcacatttctagtgttcggttacgcggggggcgggataaacgctttattcactttaatctcaaacaaacacattcttacttttccgtacatattacatggtagcccattctgacattctctgatggcacgtcgtgagttgagagttgactggttttggtttggttaaattcgctatcagaacgcgtaattggctgccgccttgtttgttatggtttcactacggaaagatgattactggaagctgacggaacgtgcaggctaattggcagtagtaatacatgagcgaatgtaggttcgttccaaccttccaggacagtcaactctccgcacgttgatccctgttgccctcatgcctgctacatcagcaaccggaccgcaatgagatcctctgcaccctgcaggtcg

SEQ ID NO: 5183 - DNA, 2468 bp, Zea mays
tgtttgtctaccgtatttgcgtgtgcgtctcttgtttgcctgcgattgaaagccttctctgacctgtctccaaattggcattcctgagcaaaaatcccctgcaacccgacccatagccatgggcaagctcgaggagaggacgcgtgcgttctggacgaaccgatggcttgtgttcgttggggccatgtggatgcagtccatggccggcaccacttacatcttcggcgccatctcgccggtggtcaaggccaggctgggctacgaccagccgcaggtggccgcgctgggtgtcgccaagaacctcggcggctgcctcggcctcctcgccggcgcgctctcggcgacgtggccgccgtgggcgctgctggccatcggcgccgcgcagaacttcctcggctacggctggctctggctcgtcgtctccgggaacgtgccggcgctgcccctctggctgatgtgtgttgttatctttattggaacaaatggccagacgtatttcatcacggcttcacttgttacaagcatccagaatttcccaaagagcaggggcccaacagtgggcatcctcaaaggatttatgggcctaactagcgccattctgacacaagtttatacagtgatgcacactccagaccatgctgcgcttatcttcatggttgctgttggtccgtcgctggttgccattggcttgatgtttgttattaggcctgttggtggtcacaggcagatacggccatctgacaagaacagcttcatgttcatctacactgtatgcttgctcctcgcctcataccttgtcggtgctatgcttatccaagatttcctgcaaccaagctatgatgtggttgtttttctgactgtgattctgttcgtcctccttatttcaccaatcgcaatccctgtgattgtgtcgttcatgccggaaaaagctcagcatctcatggaagatgctctcttatctgaaccattgacaggagaggcaagcagttcacgacaaaaggaggatcaaccagaggtcattttaagtgaggtagaagaggagaagtctaaggaaactgattcattgccgccatctgaaaggagaaagaggattgcggaattgcaggccaagctagtggaagcagcggcaagaggtggggttagaatcaaaagaaggccacaccgaggggataacttcaccctgatgcaggcattggtgaaggctgatttttggcttatttggctatcacttttgcttgggtcgggatcagggctgacagtgattgataacctgggtcagatgagccaggctattggttataaaaatgcacatatctttgtgtcactggtgagcatatggaactttcttggtcgtgttggaggtggctacttctctgagatcattgtcagggaacgtacatacccaaggcacatagcattggcagttgctcagatcgtgatggctgctgggcatttcctctttgctatggcttggcctggaactatgtacattgcgagcttgctggttggacttggatatggagctcactgggctattgtgccagctgctgtctccgagctttttggtgtaaaacactttggtgcgatgtacaattttctcatactagcgaaccccgcaggatccctcatcttctcagagctaattgtcagcaacctctatgaacatgaagctgagaaacaagctagccaacaccagatgtcagcattgctgtctccacgattgcttcgtgataccggctttcttgcagatgatgcactcaagtgtgaagggcctgcttgcttctttttcagctctctgattatgtcggtgttctgtgctgttgccgctgggttgagcctcctcgtcgttcaaaggaccagacaagtttatcctcgcctctacagttctgtccgcacttgagattctccaattctccatggatgggaagctcaaatcctcgtattctatgtccgtttattcttgcatacatatgcacaaagataagtatgtgaataaattctcaaatcttttcctaagctggtattgtaaaaacagatattcttgaatggactgtcccttgtgacttgcctatggattctggcacttgctgtcctgaaaagaaactatccctctccttttttttgaagcaattactgtatggagttcctacaatatttttctattaaatatgggtatgtacaagtgtaagtattcaaattacaaggaaatcaactataaacatgatttaattttggctgctatttggggttttactctatgacaaagaatcatttcttttacaaacatttctttgcatattgtcgccatgggggtttattctcaaagatccatccatttctgcattttcatatgcaccaaaccatgatgatgataatctccatcctccaagttttcgttagttgcgcaggcatatgttgcacagctagaaattgattggaagtgcgcggtggtacaaccctatcagggg

SEQ ID NO: 5184 - DNA, 3727 bp, Zea mays
  misc_feature (2009)..(2009): n is a, c, g, or t
cgacccacgcggtccgcgcgtgccccgctcccccgcagcacccggctccccttttcttgcgcgacgcgagatccccgccggggccctcaacgcgctcgcgtcgcgccgcggatcccccaccctcctcccctctgcacgccgccatcaactcgcaccggccctcgcccgtgatccatcctctcccccgcggcaatgatatggcgtcccccctcaaccgaccattcccgcagcggatccgcaccgacccgttcgcgccggcctctggaagaagaatccaccgaaggcgaaaacgacgacggaggtccggctgactcgtctgggtctttgcaacagcggcaagcgggttggagctccgcttcgggcaggggagaaccacgtggagacctggagtcacgctgcctagactcgccgctgggtggattcgtcgcggtggaggtcggattgtgaacacgccgtccagttaggacgctgtcgtctccagatccaggggatggggttgctcggcatggcggccaagggcccctcgcccacgcgtcgcctactgccacagccgcacttggccgtctcctcgctggcggcctccgtggctctgatccactgcttcctcaacacccggagatggttgacgtcgccttcgtcgtctcctcgccagtggcctccaccagccccgcagtccaagacaaagccacgacatgagtcaacccaagtccggtcgcacctacaccgatggccgtacccaacgtgagtcaagccaagtccattcccctcccttgcttcctcaacttgttgtcttgtggtctgctatttgtctcagagaaggtggtgccatcatcaccagttgtgattatgaattatattctaccgataggtattcaatctctctattcggcaacaccttaaaaatatgtacttcaaaatattgacaagtggattgcaggcttagataatttttggaacacaacattgctccaaaaagtttttctaaagaaaaggtatcaatctgcagtttggtaagtgagtctgaatctgcagcaccaaggacttcaagaattagtctgaacctgcacttacagttccatccacgcgtccgattattaataatattattttttaatgaataattgaatatatattgagtctgtgtcatagattcagtcaccttaacaccctttgttgttttcccacttaagttagttaatgagatgaatggatggaaattacgtagtgaatgtatgataagtccaggctacatgttaaaagacacacttggctacttgagctctgtattgccatgaagaaatcttactgacgggtgctttcatctgctatttggatccgttgctgatggatcttacaaagaagttgagctttaagaggaacgtggtgtcattgtcatctgagctcaagggtgtgaggagcaagcttgcttcctaggagcagctgtttgtaagggaatctcaaactagaaagcttgcggagacaaaaacaaggagcatggaagaggaagtaatcaagctgcagaaatgcttacaggacaaggatgggcaactgtgttcatccacaagtagcacggaacagtaccatcatgagttggatgatcttagaacacatctgtcatttactcaagctacaggagaagcaggtgttgcatcagctaagttagctcggatgtagtgcatgtcattgctgaaagagctgaatgagaaggacaactcactcaaagaccatagacttcgagtgaacaatctaggtgagcagcttgatcttctccagaaggatgtacaagcaagggaggtcacacaaatgcaacttaaagatatagttataaggatcgagaccaacatcatggatgaagttgccaaagcttttgaaattgcgatgttgagaggggaaatcagaatattgtctactcactggacgaacaaaaccaagaaccttgaatcacaggtatgctacatttcttttatttgttcataagaggccccaataacttggttacaaatgctttngtttcctataacgttgaactgaagtatatttacatgagatttattgatatttgatcagttaaaaaagcaccagagaactgatcaggagctgaagaagagggttctgaagcttgaattttgtctctggtcctgtcatccactggtgcgttcgccaccgcacctaccgctgttactagctcccttgctcttctcttgctgcgactgggatatagcatcgtggatcttgaacctaggccagaatttaggcaggtctagaaccaccatgatgcctggaacatactcctattttatccatgtatgagccttatgggaactctgcaattactatggatcctcttatacattatgttcgacatggagacaaggtagtatattgagttggaccaataatccttcatatttatttatgtgaattatgttgtactggtgtcctgtccttttgtttgtgctttataatttgtaattcttagctattgatatggtatgatggatgggaggtggctgaaatcgttcagataagtgccaatttgttgttttcttttttaatgaatggttttctatttcagctgatgaaccttttatagttcttttattatatgctgccactgattgctaatagggtgcatgtcttctatttctaggtatggtgcataaaaaagtaggaaccacaatgagattgtaatgctgcacatggcacatcaaggtgcgcaagatatgtaccgtagaaattatcgtaaagtgcacacagctgtatgtatagatgtttagaagtggtcgaagttaggcttgctcaaccggggcaatgatttacttagcctgctgaaatgtactataggtagcattcaagtttgtgaccatcatgcaagtacatgtgggtttgttgaaattgagtggtcatcggagaagtagcaaaatgttccctatcgagagctcgtgtactatatttgttttatgaacttaatttttattacaacggaacatgtggtcatacatatgttattgctccaatattttttccgttgcaacgcacgggtatttacctagtacccaaaatatataaagtgatactatattggatctccttaccccatatgccatatttgcatcatagaaagagcatacatatatttaagagtggttaattaaaacaaatgatactaaaataaaagaaagtgcatcttgttggacatttatatgtttgtgcattaactaaaataataagataataatcactagaagttggattaaaccctaaatggaaattagggtttgaaaataagaaaaggagagaagagaaagaaaaagagaaaatgacatagaaaaataaataatatatatacctaaaaataccccaaaaatggtatttatgatttcacaatataagttgagaaaaaactggacacaagatttgaatttaaactctaggtttgaaaataaaaaggaaaataaatagaaaagaaatgaataaaacaaaactaacctaactgggctcactgcgcgctttcggcccacttctgaattccttctgcgcggcccatctccacgttctacgcgtgtgccgggcgccgacatatggggcccgctggccagccaccagcctcacgcgcacgttcgcttctgtgtcactgctagcgggaccgcccagccagtctcctctcgcgcttgccaagacacctacatgcggggccacgacgtcagcttcatccccgtaacaaccc

SEQ ID NO: 5185 - DNA, 4200 bp, Zea mays
ccacgacgggcccgagcacagctgttgttcctactgcatctgcatccatggaggccgacggagcagtctgccagtctcttctccatcggtagtcggtaaggaagatggagcgaggtcagaggcgacaacgacgtgtgtactgcatgccggctgccgttcgggtcccacaatctcgaaaatttatagcggccggggcgtggaatctgagccccgcggccggccagggcacctcaaaactggggaggattcacggccgttccgggcacctgtctactctgtgtgactgtgtctgtcctgtcgtcgcgggccgcagcctcggcttcccagttcccacaccccacgcggccacccaccccacccgcacccggcgcctcgcttctttattccgctccgctcagcccgcccgccagagcatcacatgccattgccaacctctcactgctcgtaccgcctctccactccacctgctgcccctgcgccctgaccgcgaggggagggcgctgagctaccaaggaagccaaccggcgcggaccgggtcggtcaacgcttgctgtgcacccgaccgaggaagctaggaggatcgagcacggacatgttggcctcggcgtcggtgccggccgtctaggaaaagctcgcccgcagaggtaatggatgggcggaggaggggcggcggagctatggcgtggctgctgctgcttctcgcctcgctgtgcaccggcgcgtgcgggctcaatgcggacggggtgctgctcatgtccttcaagaacacggtcaccgcggacccgctgggcgcgctggccggctggagctacagcgacgccgcgccgtgcgcctggaacggcgtcatctgcaacggcttcccgcaggacgacaccgcgccggcggcggcgaacgtgacctcggcctccgccgacggcaacggcaccgcgacggtcgcgcgcaacgccaccggagcaaccgcggcggccggcctcggcgcgtcgctggcggcggccacggtgtcgcgggtcatcagcctcgtcctacccaacgcgcagctctcggggacgctgccgcccgacctcggccgcgtcgagcacctgcgccacctcgacctctccgggaacggcctcagcggcagcctgccgcctacgctgctcaacgccaccgagctccgcgtcctctcgctcgccgggaacgcgctgtcaggcgagctcccggacgcggcggcggcctatgcgcgcggcctgcagcagctcaacctctcgggcaacgcgctcgcgggccgcctccccgccgcgctgtgcaggctgccgagcctccttgcgctggggctcgccagcaaccacctcgccggtgagctccccgtcggaggcctcgggacgttggagcttgttgacctgagcgacaacgacttcaacggctcgctcccgtcggacttcggtgggaccgcactccgcctcctcaacgtttcgtccaacaagctcgccggcgctgtgccgaccgagctggccgccgtcgtccccgcgaacgcgacggtggacctgtcgcggaacaacttcaccggcgcgatcccacaggccggcccgtttgccgcgcagccggcggcggcgtacgagggcaacccgaacctgtgcgggccgccgctgaagcaggcgtgctcgatcccgtcgtcgctgtcgaagcctcccaacgccaccgactcgccgccggcgttcgcggccatccccaagaaccccgctcgcgccccgccgcaagcccaggggcagccgccgagcgagcaggataagcttcgtcccgcgtccattgtggccatcgtcgtcggggacatcgccggcgtcggcctcctcttcatgctgttcatgtacgcgtaccacgtcaggaagaagaggcggcagcgtcgggagcaggacccgacgccgccgctgcacctgcagcagaagagcgcgcgaggtttcgacggcggcgtagtcaagacgctcgacatcgccggaggcaaagaagagaaggcgtccacgtcgacggggcccggccgtccccgcgggcgcgacagctcggccagctccgagtactccgcgtcgtcggacggcgagtcctccgacgaggagggcctcaagaagaggggaagcttcatcggccggagcaccccgcaggagcacggcagcaagaagcacaacctgccccagcagcagcagcaggcgccccccgcgcctgcgacgctggtgacggtcgacggcgacggcgagctcgagatggagacgctgctcaaggcgtcggcctacatcctcggcgccacgggttccagcatcgtgtacaaggccgtgctcggcgacggcaccgcgctggccgtccggcgcatcggcgagagcggcggcgccgaaaagctcaaggacttcgaggcgcaggtgcgcgccgtcgcccggttccgccatcccaacatcctccggctgcgcggcttctactggggcgccgacgagaagctcctcatccacgactacgcccccaacggcagccttgccaacatcgcattcagcaggcgcttcgggtcgtcgtcgccgctgcacctgagcctggaggcgcggctgcggatcgcgcgcggcgtggcgcgagggctggcgtacatccacgagaagaagggcgtgcacgggaacctgaagccgagcaacatccttctgggcggcgacatggagccatggatcggggacctgggcctggaccggctggcgtcgggcgaggcggcgccgcactaccgcgcgggcgcgtcggcgcggctgttcgggagcaagcggtcgatgcactcgacgagcagcctgccggacctgtcacagatgcccgggccgggcgcgagcccgtgcgggtcggcgtccgcggcggccgcggccgccagcgccgccccggcgccgtaccaggcgcccgagtgcctgaagaacctgcggcccacggccgtgtggggcgtgtacgccttcggcatggtgctcctggagctgctctccgggcgggtctactcggaggtggagctgtgccagtggcacgcggggctggtggccgccgaggagcacggccgcgtgctccggatggccgaccccacgctccgcggcgaggccgacggccgggaggacgcgctgctggcgtgcttcaggctcgccttcgcgtgctgcgccatggcgcccggcaagcggccctccatgagggacgccgccatggtgctcgagcgcacggcggcggcggcggcgcccgccgccgccgcgagcagcagcggcgccgctgtgccctgagggggaaaaaacaactgaccttgtagcgcttggagccgttactgatcgcaataatcttactgcaagtgcacggacggtggtggcggcgtcggcgttgatcgccggtggcgagcttgtgtggtagggcgtgtacgtagatctgttactgattttggaggtgctgcgagaattaattaacctactaatcatctgtgtttgtgattgtggatttgaaagcgatgcatattccttttttttcgatcttgcgtctcggtggatctcaagatgtgtacttactgtgacagtgtcagtgtctgatggccacacgatcaatgggttcttctgaatctgatcgaccaaatcgggatggttcttgaacctgtcgtgccggttcagttcagtgcaccggagccggactcggacaagaattcaacaaggcctgctgctgctgctgctgctttgacaggcgctagccgccaccggtacaactctccaagtctgttttgtccggcgcgcgcacgcgacgaaacgcggtgtcccgccatgtccgttccagcgctccgcagcgagcagggaatattgtagtggtcttcctcatattccttccaccgtgccgtcactctcctcgagacggagacggagacggagacggagacggaccacgggcgacaggccagggcaagcagagagagtaacttctctgggcctctgagggtttgggaagatgccgtgttggccggggtttttttttctgccggccgcgtcttcctgccctgtgctcctgctgctctgcatgtcggtaccaccctcgcctcgtgacacgtgatcgccagagcttagccagtaagcacgggttccttaattaggtctaacccagacccagcaagtgacaggttaacatccagtccccagaaataagctgacataaactactgtgtatgtgagtgagataaaggtcaagttcttg

SEQ ID NO: 5186 - DNA, 1078 bp, Zea mays
gccggccgggtttgggagagcagcgagccatcgacacgatcgcgagcgcaagcacgtacgttgtcggaagctcaagttagaagaagcaccagtgcctacgccatgctgggcgcggtgggcgccatcgccccggagatcttcggcaagatgggcatcatccccccggagaccgcgctgccgtggttcaagacgggcgtcatcccgcccgcgggcacctacaactactgggccgactcctacacgctcttcgtcttcaacatggcgctcatgggcttcgccgagcaccgccgcctccaggactggtacaacccgggctccatgggcaagcagtacttcctcggcctcgagaagttcctcgccggctccggcgacccgtcctaccccggcgggcccctcttcaacccgctcggcttcggcaagaccgagaaggagatgaatgagctcaagctcaaggagatcaagaacggcaggctcgccatgctcgccatcctcggttacttcatccaggggctcgtcaccggcgtcggcccgttccagaacctgctcgaccacctcgccgaccccgtcaacaacaacgtgctcaccagcctcaagttccactagaacgtggtgcatcagcatacctgctgctgccgccgccgccgccagttgtttgctgtggaaagctaaatgcatgcgtgttgtaaaggaacctgaagcgttgcatcggtcatgattcatgcatggccagcctgctgcctgtaacaacaaactagtattgatcttattgagaccggaaactgtattgcacatggtaaatcaatgtacaattcctccctagatgcggacaaatttctccctaaggccatgaccatggtggatgcacgtgggacgtatttgtagcagaagagagtatgcactctgtgggtatatccaacggtgatgcgcatgggagcatgtgtgcttagagacaaaaacaacattggctttcattctgttctatcaccaatatttgcggacagtgagagagagcaaggtcccttgtaaaaaatgagtatatttggtgtagctaaagcccccatgttttgggggtttgagc

SEQ ID NO: 5187 - DNA, 1306 bp, Zea mays
atacacataggaaggaaacttctacattcacaattttcaatggaagattttcccacgaaaaatcagggatcggatcccttctcatttctagtccgagatcacccctcttcataaaaatgcggcccccgcggcccgccggcccggcattcactttccaagttgtccgaaaagaccagactaccctgttcccccgaagtcagagggggagaggaggctagggatagagcagcgtcatcgcaccgctcgccggcgagccagatcatcagtgaggaaggcagcgatggcggtggtggagctgtgggagacgctgaagcaggcgatcgttgcgtacacgggcctgtctccggcggccttcttcacggctgtggcggtggcggccgctctgtaccacgttgtgtcggggctcttcgcggccccgcccccgccgccgccgcgcccacgggaggagcccgagacagagccgctccctcctcccgtgcagatgggggaggtctccgaggaggacctccgccagtacgacggctccgaccctaagaagccgctcctcatggccatcaagggccagatctacgacgtcacccagagcagaatgttctatggacctggcggaccttacgccctgttcgccggcaaagatgccagcagagctctagcgaagatgtcgttcgagccacaggacctcaccggcgacgtctcgggcctaggcccgtttgagctcgacgccctgcaggactgggagtacaagttcatgagcaagtacgtgaaggtcggcacggtcaagaagagcgtccctgtggaaggcggcagcaccgcgagcaccactgaggctgagaaggcgccgacaaccgaagagaagccaagcgaggcggtggttgagaaggaagccgtggctaatgaaggtgcccaggaaaactagagcttttctgtgcatgcggcaataattcgacatggtcccatttgggtcttgtcagggccctgctatcctctcgtgtctcgtgtcgtatatcagcagcaatggcccgtgtgactggatacgtccatctgtgccagcgccgtggtgctctataattgctgttagtcccttgtggccttgtgtgttcgatcggataatcgagttattttctttgcagtaccctaaggtcatcaggttccttgtaatgtctcgcgcacgtggggatatgccatgaaattgtcgtggaagtcatgttattgtttactgcaatgtgattcctgtcaacgtgcgtggcattgagccaaaaaaaaaaaaaaaaaaagcccgagaatggtacgagaaccgcccgccctc

SEQ ID NO: 5188 - DNA, 1510 bp, Zea mays
tcgttcaatttctgtttgctagactgcagatgcaagtgcaataactgtcaaccaatcagcgcctagcttgaagcctggcgttacccctgtggtagagtattttcctggtacgtggaaatcatcaaaccacctcatttgttgtgtcccgcaacgcacgtacccagacctgtggacaggacgcctcggaccagccagcggtcatggccatgcacctgccagcctcatagtaatcaccttgaagcttgacatactatgctactcatcaatagactttccagtggcggctgctgtatctgaacttgttattccaggattagcagatcagatgattgtaatgaagagaattattgcttcagagataactcaacaagcacagcttcaaccattccattttattccttctggttggcatgttccagtaacagctatatacaatacaagatatggtgagactgaggagaggcaaagtgagctgcgaaaagaactgcatttaaggctaggacttcccttagatcggcctttgttgcgaatttctaatgcattgactttcggtggcatgggaaggaggaagaaaagcatgccaagaagtggttcttcgctgcttcgagacatccacagagaacttccatctagtggtgtatccggaggtgttatgtctttgattgatggttcatatgagtattatcattatcttcacgatggtattgatgacaatggatggggatgcgcatatcggtctctacaaacaattgtctcttggtacagattgcaacaatattcatcaatagatgttccttctcacagggagattcagcaagttcttgttgaaattggtgacaaggatccatcatttattggatcttgtgagtggatcggagccattgagttaagctttgtcctcgacaaactgctgggcgtgagttgtaaggttatcaatgtgaggtctggcgatgagcttcctgaaaagtgcagagaacttgccaggcattttgaaacccagggaactcctgtgatgattggtggtggagtcttggcttacacccttttgggagttgattataacgaagccagtggagactgtgcatttcttatccttgatccgcactacactggtactgacgatctcaaaaagattgtaaatggcggatggtgcggatggaagaagtctgtcgacagcaaaggccgaagcttcttcttgaaagacaagttctacaaccttctactaccccaaaggccaaacatggtgtgaaacctatggtgttcaatatgttaatagtgcagacgtgcaggttcacgaggcacagatatttatgcttgtgatagaggtttatggttgcgatagcagaagttatgatttgtaaaaaaaatttagtgagacattatattgtttttttaataaatttgtagtgagtaaattaaattaaattaacgaatttgagagttttacaggcataacactaatagctcgcgttttgcttgagacgtcatgcttaacaagtggagtctgtgt

SEQ ID NO: 5189 - DNA, 1304 bp, Zea mays
  misc_feature (1243)..(1254): n is a, c, g, or t
  misc_feature (1256)..(1261): n is a, c, g, or t
  misc_feature (1280)..(1281): n is a, c, g, or t
ttaatcggtcctaatcgatctggcacattgttagtactcctgctacgtactatgtttctagtagcccacaagatctagcccagtccaaacctttcgatccgtggtgtgttggatctgaacccaagctccgagtcgctttcggggtgggcattctcctcttcgtcttcggttgcaagaaagaaaaagcatcatggacggcttccccaagagcgtcggcggtggcggccctaacattccggcgggatcccaccccgcaggcgggagccaggcggcggcaggaggaggcgcgacgcagcggacgcagtatccgtatgtgactggtaattcagtcattgccttgaaatacaaggatggtgtgatcatggcatgtgacactggagcctcttatggatcaactttgagatacaagagtgtggaacgcattaaggcagttggcaagcatagcatcattggagcaagcggagagttcagtgacttccaggagattttgcgctatttggatgaactaactctgtctgatcatatgtgggatgatggaaactcgctgggccccaaagagatccacagctatttgacaagagtgatgtacaaccggcgcaacaagtttgatcctctctggaactcacttgtacttggtggggtgaaaaagggtccaaagggtgatgagaagtatcttgggatggttaacatgattggtacccacttcgaggaaaaccatgtcgctactggatttggaaatcatatggcaatcccgatactccgtgctgaatggcgcgatgatatgacttttgaagaagctgttaagctggttgagaagtgcttggtggtcttgctgtaccgagacagatcatctatcaacaaattccagattgccaagatcacaagtgaaggatcaaccatctacccaccatattccttgaagacctactggggcttcactcacttcgaaaacccagcccagggcgctgtgggatcatggtagatttatgctctgcatgccgcgtatcatgccatgaacttaggggagagcaatctgtgctgctgaaatcaaaacccttgtgaacgtttgttctgaacataactggaactctgcatttgcttgtatgacatgcgtatggttcaggaagtttaattccaatatttggtcactaaaaatggattgtgcggttgtgttctcggggcccggttctgtgttgattgtgctatgtggagaacttggaatgctaactctgttttttttttnnnnnnnnnnnntnnnnnnttttttttttttttttttnnttttttttttttttttttttttt

SEQ ID NO: 5190 - DNA, 2094 bp, Zea mays
caccaccctccttgcccgccggcgtctcctcctttccctcccggccacttctctcgtttcgccctccccctcgagcaccccgccggctagggttacggccaccgccttccacgcctcccccacttcccgtaggcggaggctggtcggcgtgcacgcgaccgcggcggcggagatggacccggacttctcgcccgggggcggggggcccagctttgaattcgccttcaacgaggtcaacttctccgaccgggaattgcgtatcgaggtcgtcgccggggatgactacgctccggggtccagcggcgccggtgccggaggaggtggcctcgccgactgggcgcgccaccgcaagcgtcgccgtgaggagctcctcaaggagaaagaatctacaactcacatgtcagaccaaacaaattgcaatgaagttgaagcagaagagtgtgatgcgtatgaagaaaatcaagaggaacctgtagcaatggtagaagaatctccacccgatgttggccaagatggtgatgatgggcaaggtattgattcgtcttggactgtggttggtacaccagttttacgagtcaagacaatttatatcagttcagcgattcttgctgcgaagagtcctttctttttcaagcttttctcaaacggcatgaaagaatcggatcagagacatgcaacccttagaattactgactcagaggaaactgccctcatggagcttttaagctttatgtatagtggaaagttggcaactactgagcccactcttctgctggatatcttgatggctgccgacaaatttgaggttgtttcatgcatgaggtactgcagccagttgctcacaagcttgccgatgaccacagaatctgcacttctctacctagatctcccttgctcaatttcaatggcagcagcagttcaacctctgacagatgcagctaaggatttccttgctgtaaaatacaaggatttgactaagttccaagatgaagtgatgaacatccctcttgctggaattgaagccatcttgtcaagtaatgacctccaggtggcatctgaagataccatctatgacttcttgctcagatgggcccgtgcacaatacccgaaatcagaagagagacgtgagatccttagttctcggctgctccctcttgtgcgattcagtcacatgacatgtaggaagctgcggaaggtcctaacatgcacagatatagaccacgagcaggcaaccaagtgtgtcaccgaggctcttctgtacaaagctgatgcaccacaccggcaacgagctcttgcagcggacacaacaacctgtcggaaattcgctgagcgggcttacaagtacagaccactcaaggtcgttgagtttgatcggccctatccacagtgcatagcatacttggatctcaagcgcgaggagtgctctcgactctttcctgcaggccggatatactcgcaagcgttccacctcgcagggcagggcttcttcctctcagctcactgtaacatggagcagcaaagcaccttctactgctttggcctgttcctggggatgcaagagaagggctcaacgagcgtgaccgtggactatgagtttgctgcaagaacgagaccatccggcgagtttgtgagcaagtataagggtaactacacatttaccggtgggaaggcagttgggtacaggaatctctttggaatcccgtggcaggcgttcatggccgatgacagcctcttcttcatcgacgggatgctgcatctgagagctgagcttacgataaagcaacctacgtagatgtgctgccgtcgggttaagtgtgtccagtcatgggtgatgtggaaaatgctgtgtgctgcagatatcctttttgttttttttccttttgttcacgcaccttaatccttacattaatagacagtttggtgatgacaaaatataaaggaaaaaaaagggctggaaagctgccttttgttgtttcactaagatgaaggttgtatgatctctgtctcttcgtagtggaagttgttacaccagatgaaaaagaaaagatatcggatgggaatccccccgcccttgagttctctgcaagtttccat

SEQ ID NO: 5191 - DNA, 1388 bp, Zea mays
ggtacccccgccgccgtccggcgtatgcgcctcgcggccgcttcggcaggccctcgcgttccatttgcttcggctcatctcagatcaagctagcgcacctgacacccaccacctccctcccagatccaccaccccagccatggccaccgcctttgactccccgacctcctcccccgccgccgcgcccttccacgacgaccctttcctccatttcgacggctcggcccccgccgccgccgacggcttcccggcctccccggacgcctacgcgccctcccccttcggcatgccccactccaacggcgacctccacgacgaccctttcgccgcacctgctgactccaacggtgggcccatccttccgccgcccaccgagatgggccgcgaggagggattcctgctccgcgagtggtgccgacaaaatgctattcaccttgaggaaaaagagaagaaggagaaggagctgaggagccaaatcatcgttgatgctgaagagtttaagaaagcttttgttgagaagagaaagctcaatgctgagacaagcaagggccaaaaccgtgacagggagaagcttttcctagcaaaccaggaaaagttccatgctggtgcagataagcaatactggaaggcgatatctgaacttatcccacatgagattgctaacatcgagaagagaggggcaaggaaagacaaggagaagaagcctgggatcgtggtgatccagggaccgaagcctgggaagccaacggacatggcacggatgcggcagatattgctgaagctgaagcacactcccccaccacacatgaagccacctccgccacctgccgcagctaccggaaaggatggagcaccagctgccgccgggaaggatggagctaagccagcaaccgttgccaacggcagtgtccctgagatggaaaaggctgctgcggaggcatcagtgccagcggcagcaccaccagcagcaactgagccgatcgcagctgcttaatctaatcatctatggtaggaggatgtgaaaaatctcttattggagttgttgcagaggcggtggtggtgagtgaaactgaaaacgtgtgaatttccggcatggtggaggcatgcactgtgtatttgttacctcgattcatttacattactgctactatatattgttattgcattttgtagagaaggggcgggcgtatcctggttcatggtaataataaggttgtattaggaggatgtttggctgtattatgtttcttcttccaagtgtttgtaaatttcccttttgttattaaaactgattgtattgttaaatttttctttgttattaaaactgattgtattgttaagctactatctgctgcatatacggagtatcttttatgatctcgtgcgaa

SEQ ID NO: 5192 - DNA, 1793 bp, Zea mays
ttggtgtcgctcgccatatccccttttcccccctcccttcgtctcccgactcctgcgatccgccccacctgaaccctactccacgtcgcctcgcctcgcctcgccggttgggttgtggctgagccgatctgacccgatcgggtgggtccttgcgccgccgctgcgtgggctcatctcggtcgcccgcctgctcggctcgatcggccggggacggcggcggctagatctgcgatggagggcaacaaggacgacgcggccaagtgcctgcgcatcggcaagggcgcgctcgaagccggggaccgcgcgcgcgccatcaaatttatgtccaaggcaaagcgcctcgacccctcgctacccatcgatgacctgctcacctcccttctcaacgcgcaagacgactccccggcttcctcatcatcatcgccgcctccaccaccgcaaactgccgcagcaggggcatcggaggcagctgaggctgatgggctgagagagaggaagcacaagggcaagaagagggaggaggaggaggcgactcctgctgccagggagtacaccgcggagcagctcgaggttgtgcgccaggtcaagaagcacaccagggactactaccagatcctcggcctggaaaaggactgcagtgtcgaggacgtgcgcaaggcctaccggaagctctcgctcaaggtgcaccccgacaagaacaaggcccctggcgcagaggacgccttcaaggccgtctccaaggccttccagtgcctgagtgatgcggagagccgcaagcgctacgaccttgttggctcggatgagccagtagcacaccacaggagggcctccactgcccgcgcatacaatgggttctatgaggatgactttgacccagatgagatattcagaaacttcttctttggcggtatggcgcctgcaaccaccaggcagtttggacagtttggaactttccattttaggactggtgggatgcatgcccatgcccatgcccaacaaaactctggtggctcaactgtcaggatgcttattcagctgttgcctgtcctactgctgctgttgctcaacttcctgccatcctctgagcctgtctactcgctgtcccgttcatacccttatgagcataagttccaaaccccacgtggagttgcatactatgtcaagatgtctaatttcgaggagcagtatccacaccaaagcactgagcgagcgacgctggagcggcatgttgagagggattattactccataatcacacagaattgcagggctgagctgcagcgtcgccaatgggggctgtcataccagacaccacattgtgatatgcttaaaaattttgaggctgcagcaaagtaataactcatccaattctgtaaggttgacatggggagagagactgctggccactcatgtaaaggcgctgccttagccgccagcttcaagtttgaggggacattttagtttggcttagtagtaaattttgtggaataagtgcctttgataactatacaccactgtccagatgctccctcttagtattggcaaggagtgcgttaattagttacttcaaaaagatatgcaagcttcataggggttgatcacatgcaaaccagtgtatgtatatgaagtatatctatctcattcttttaacttttttgaagtgaagactgtagttaaaacagaaatgcaactataacacaaatgtgatattcattttatattaaaaaaagaaaaaaaaaatccgacggggcgcccggtaccccgatcatcggacatcattccgttggtattgg

SEQ ID NO: 5193 - DNA, 4622 bp, Zea mays
  misc_feature (660)..(660): n is a, c, g, or t
taaggggggggattacttaatgaatccggaataataatcatcgtgttatagaattgtaataggtgacacttggtaagagtcaccaagaaggcataccaagcaagggccatcaccaaggttttcttggctcttggtcatcctgcgaccgtaccccttaaatttggcgacgcttgagaagggtcagtatcgaccagtagactgaatgaagcaaaataagaggtgactagatggtcatttgtgtggtgtgttctggtggcgatcgagtggtactccattactgtcttccaagttccatccacaacgtctgacgtattgtagttgtagcgagcatgcaaacttattaaagacggccagcactgttcgttggcgcgccataatgtgttgctgcggcatgcatgcatgcatgctcatcgaccccactcgcagaactgacgcaacaaattgaattgcctgtcgatgtttttatctttttataaaaaaaccctgcaatcttaagcccgcgacacggcgacaacaacgattatttgttgaaccaccggggcagtacttgctgcatacaacaacgattttttttttaaaaaaaaattattgaaccatcgtctcaccattttttccagctgtctcaactgtccgaccgattggcaattcaatggccgaaantaaagtggtgcgtaattattatgggaggcatctaatcttctcgtacgccatgtgacattgtgtgtctcccaaaagaaaaaacattactacgtacgtgtactcctacacttgagctcgtatatatctgtggtagttttattattattttgaactcaagtgcatatatactcacgagcaaaataaataaataaattaattaaatcgtgcagctgccaagcttatactacctgtgataagttcgtcatttgaaacccttgtaccacggtcgttgatccatattttaataagtcgtccaacccctagcaatataaatggactctcagcggtaatctctgggtacaataataatgctcctaaattagcactagtagaatagtggtagtaaaaattaaaggagaaggccggtcaatcgaaacggcaaggaaagcgatagcgacgaggagtgggctgggccggggcttggcggcaataaataggcggccgggtcatcggccaaccccccatcgccgcctgctctctacctctgcactccaatcagatcatcagatagatcactggccccgtgctgattaccgcgcttcccatctgagcagccagcctcccagggtacagggagagacgcagaagagacagctgctgcctcgctgagacgatggccggaggcggagaccactcccagacgaacggaggccacgtcgaccagagggccttggaggagggcaggaaggaggagttcgctgaccagggctgcgccgccatggtcgtctccgtcccatttatccagaaggtacggtggtgctgtgagagatcaaaaggcactggccgagatctctctctcgtctgccgtgttcttcggctcttcccccgtccgcttaatactctctctctctctctctctctctctcaacatcaacgttattcatcatgtctcggtcaaattatggagttttgtgctgctcactgcatttgcagatcatcgcggagatcttcggcacctacttcctgatgttcgcggggtgcggcgcggtgacgatcaacgcgagcaagaacgggcagatcacgttcccgggcgtggcgatcgtgtgggggctagcggtgatggtgatggtgtacgccgtgggccacatctccggcgcgcacttcaacccggcggtgaccctggccttcgccaccagcgggcggttcccgtggcggcagctgccggcgtacgtgctggcgcagatgctgggcgccacgctcgcctccgggacgctgcgcctcatgttcggcggccggcacgagcacttccccggcacgctgcccacgggctccgaggtgcagtcgctcgtcatcgagatcatcaccacattctacctcatgttcgtcatctccggcgtcgcacggacaacagagcaatcgggggagctggctgttttgtttgtttgtttgtttgtttctttcttttccggtcgttcaacccgtacgtactgtgcatatatatttgcagatcggggagctggctgggctggccgtgggcgcaaccatcctgcttaacgtgctcattgccgggtgagtacttacgatatatatacttactcttcgtgacgtgctcattgcctggaatatacatattttgtacaaaatttaagtagtacaaattataataagtactactacaaattataaggagcagccagcagggttgtcgtcgtcacaagaataactttcaagattatttttgttttacttttcattcacaatgcgtgcacaaaagtgacgacaaactgcctagctagagtatttacccaacaagtcaagtcaaaaaccaaaagagagaattagaatatagatattttttatagtggggctttgcgttgtggacgatgtgtctcgatctgtctgccgagcagggttttatggagccataaagaccgtcacatgagtagagtagggcagggaaaaatgagcttttaaagtgtggttggtgagacaccggtgcaatgacattaatatgaacgtaataccactccactccactgtccttccagcttttaaagtgtgtttgcagaaaactgcagagataatgtgaacaccatatatatacttacttgttattagtaatgacaacagtcctaaaattacacgctgcccacggtgctccgaggtgcagtcgctcgtcatcgagatcatcaccacattctacctcatgttcgtcatctccggcgtcgccacggacaacagagcaatcggggagctggctgggctggccgtgggcgcaaccatcctgcttaacgtgctcattgccgggcccgtctccggcgcgtcgatgaacccggcccggagcgtgggcccggcgctggtgagcggggagtacacgtccatctgggtgtacgtggtggggccggtggtgggggccgtggccggggcgtgggcctacaacctcatccgcttcaccaacaagcccctccgcgagatcaccaagagcacgtctttcctcaagagcacgagcaggatgaactccgccgcctccgcctgatggatctccatggccggtaatttagcctacaaaactatatattcacccgtgtcgtcgtgtcagtacgtgagaggatatagatatataattcctgcgtgcgtgtgcgtttgtgtgtggatggaaaacatatggaagaagaggtatggtttgtgtgtggatggaaaacgtactgtgcctgccttcgaccctgggcaacgtcgctctaccccgtgaacgtgcttaacctgttgccgcatgttttgttaactcaattttaatgtgttggcgagatcatacgcatcaaaaagaaaaaaaaaaagcccgcctgggcgcgccccgtacgacacatacagagttccatccctccagtctatgacacacacgcgtgcgtcgaagaagactgaaatggaagagagaattaactgagcaagaccgaccccaaaaaatagataagcatccggtgtaggtagttaggtattagacgactatatacagtaaaatataaacaaataaacatgatttggatggatggatgaaccgatggtgttcgatcgcaagggcaacaataacatatacgtattcgcgtttcacattactattttcgccatgaaagatcattgatatgtaaatttgaagtcattacgaattcacataatatcaaattatatatttctaataaaatagaaacatgctacaacaacaatgttagggtgcatttggttggagagccaattgtcactactggacaaagttggaacactcggcaaagaagcttatttgccgagtgtcaacgacgaacgctcagcatagttaacggtcatcatctataaacgccgtcttctttactgagcatcttgtttcgctgagagcttcacgctcgggaaaacaacctttgccgagcgttgttatatgacgagtgttttgcacttggcaaaggttgtctgtgccgagtgtcgtagttcgccgagagtggcacccgacaagtgtagaatggagcggctccattccaatttctgaaaatggaaccatttcattttatgtttggcaagtagaacaaagccgctctattttttgtttggttgaagagtagaatataacgaagccgttccattcattgtttggttggagagccatacaagtgtgaaggggagaagagaaaggagagcgctcacatctgtaagagcgctcatatttgatcgttttggtggagcaggagcattccaaatatttgccatatatagactgcagagccactgcactcctcttccgttagaaaccaaacattacagaaatggaatcattcaattctcctctctcttctcaaccaaacacacctttagtttttttagcaaataaagcatcttcaatactatatcacgaaaagttttcatggcacttcatcacctaattgactagtactcgtttgaggcgatggcatagaaccaaatctcctcagcatatgacctcg

SEQ ID NO: 5194 - DNA, 2489 bp, Zea mays
ctctcatcgcggctgcccctcggcgatctcatgagcctcggtcgcctctcttcctcagcccgctcgccccctcttcgatacccccgataaaacccccgacccgccccgtctccagctggccaccccatcctcgtcttctccaattccaaagtaagaaagccacacgcgaggccgaccgaggaagtccaatctcatggcgctctcctgcatgaggtgccccgcgggcgccggcgccgcctccgcccgacgcgccgcagcgcagccgttggccgcggaggctgcggtctccttcgccagatgccgcggcttcgggaggtccgccaccgctgcgacttccgcctggttttggcgcaaccatgccgttgcctcacagggagtgaaagctcccatggatgctgatgtcaagaatgctgtcatacctcctacctcaccaaaggtggaaagtggctctccttcagaaatcactctggatgaatttgaagacttgagcgctctatgcaagaatgatgattctactgttagcatcacagtagttggagcatctggtgaccttgccaagaagaagatatttcctgccctttttgctctctactatgaagattgccttcccaagcatttcaccatctttggctatgcacggagcaagatgacagatgctgaactgaggaacatggttagcaaaacactgacttgcagaatagataaaagggaaaattgtagcgagaaaatggaagagttcctcaaaagatgcttctatcattcaggccaatatgattcagaagagcatttcatagatctagacaagaagctaaagcaacatgagggttccagagtttctaaccgccttttctacttgtcaatacctcctaatatatttttggatgttgtaaaatgtgcaagcaaatcagcatcttcggtgaatggttggacacgagtaattgttgagaagcccttcggccgagactcagaatcctctgctgcattaacaagcggtctgaagcagtaccttgtagaggaccaaattttcaggattgaccattatttgggaaaagaactggtggagaatttgtctgtcctgcgcttctcaaatctcgtttttgagcctctctggtcaagacaatatataagaaatgtgcaacttatattctcagaagactttggtactgaaggacgtggaggatactttgatggctacggtattattcgagacataatgcagaatcatctcattcagatactagctttatttgctatggaaactcctattagtttggaagcagaggatataagaaatgagaaggttaaagttcttcgttccatgaagccgttgcagctggaagatgtggtcgtaggacagtataaaagtcacacaaaaggtggtaccacataccctgggtatactgatgataagacagtgcccaaggatagtgtgactccaacgtttgctgctgcggcgcttttcataaataatgccagatgggatggagttccctttcttatgaaagctgggaaagctttgcacacaaaacgagctgagattagggtacagttccgacatgttcctggaaatctctacaaggggagttttggcacagatcttgatagggccactaatgagcttgtgatacgtgtgcaaccggatgaagcaatttacctaaagattaacaacaagattcctggtctcggtatgcgactagataggagtaacttgaatctccattatgccgcaaggtactcaaaggagatacctgatgcttacgagagactcctgcttgatgccatcgaaggagagcgcaggcttttcatccgctcagatgagttggatgctgcatggtcactcttcacacccctcctgaaggagctggaagagaagcggatagctcctgagctctacccatatggaagccgtggacctgtcggggcccactatctcgccgccaagtacaacgtaagatggggtgacttgagtgcggagcactacaaggcatgaaacgaagatggccatatctttgtgatattcttgcttttccatttctataagtttgcacgccctggcagtgagatagatttaagagaaaaaaaagatgagaataaggcgggcagttaactaggttggaaggcatgtatccattactagactgaatagctttgttggcataattgcagctgttagggctagtttgcaaccccgtgtttccaaagaattttcattttcccaaagaaaattagtttattttccctttggaaaatgagaatctcttgggaaaattgagttgccaaacgcccttaaaaatatgtttctaggaatcagtttatttttcacaggaacaataaaggaaacggaaaaaatttgccgcatttcaaaaaaaaaaaaaaaaaaaaaaaaaaaaaaaaaaaaaaaaaaaaaaaaaaaaaaaaaaaaaaaaaaaatataaaaaaaaaaaaggggggggcccgccacttgggggcttgtccacccgggaattaat

SEQ ID NO: 5195 - DNA, 1581 bp, Zea mays
gaagtaagcgtggatgttgcccacgtggcccccggctcctccagaagtagccatacggattcagatcgcggccgcggcgactccccgagcagaagaacccgatcgaacgcggccgcggcggcgactccccgatctcagatccctgctgcgagcgaagggttccattcgagcagagatggcggcggcatgggaggtgctggctgtgttgctcgtcgcggcgcaggtggcgtcggcggcgcaggtcacggcgccagcgttcctgtgggcgcccaaaaactacggattcagctctgatgatgctaaggaggtagtccattaccaaacaatctcaccaaagagcttagctaaatctgttctcgaggaaggtggctggtcaaacttcatgtgctcaagggaggatactcagaataatgttgatgttgccattgtttttattggctcaaagctgcaatcgtcagacatatctaaagataagcaagttgatccagctttagcagacacactgaagctctccttcacacgctcagagttttccatggcattcccctacgtttccacgacagtcgacgagagactagaggactcgttgctatccagctttgccgagaactgcaacaatggtttcggaagaaaccgcgtcacctacacagacacgtgtaccggtcaagatctgaagaaataccacaacatggatgccatcaatgacctggtagtgtcaggggtagcgtcaaggagagtcaaccacccaagtggacagaccgatgtaatcgtcttctgtagcggcgggttcgagaatccaggcactgcgaaatcagaaggagagctgctttcccagcttgtggactcgctggacttgtcgggagccaaatacacggtcctctatgcgtcccaaccgtctggtttgctggagagcccttcgggcctgccgctgggtaggcatctcgcggagaagaagactaacggcacgaaagctgtccagggcgaaaaatgcgatggcgagtgcctcgtcaaatcgagtctcctcgaaggaactttcgttgggatagtgcttctcatcatcctgatatcaggactcatgtgcatgatgggcatcgatactccctcgaggtttgaagctccccaggagtcttgatctctcccttggactgcagaatccgcgggggggttgtgacgagggcacgcggcggcgttgaggggggccggtgttctgttggtgtgcactgtggatatatattgtttagcttcccatttggaagggagtacgccttgtgtattttttttaccgagccaactgtcactcacgatgtgctagaattttttggtgtaatatttgcgtttcgcgcctatggacaactaataagctgaggcattgcagcagataaattcatgtgctgcgtgaggcaggcttgtgttgtgtaccagacgcacagcattgttgcctccagctagtgctttctgtgtgaaataaacctgaaacccagtcccaggccaccgcaccaataaagatgggtactatgcatcaatcaaaaaaaaaaaaaaaaagcactaaaaaaaaaaaaaaaaataaaaaaaaaaaaaaaa

SEQ ID NO: 5196 - DNA, 2870 bp, Zea mays
gatattcccccaccacccacaccgagccaccgaggcgcggcaggaaggaaaacagcgctgcggcctgcgggaatagagtgtgtcgctgtaaaaacaggggagggggacgcgcccgctgccagtgcctgccgcacacgcgtgacgcgtttagcctttaagtcccactcctcgccgccccagatctccgccctcctcaccactgcccccccattccccggcgcccagcacccggcgccgcaaccgccgcagtccggagcaagatcggtgggtagacggacgggcgacaggcgggcgggcgcggctctgtctgtatctatctgttggtgggagaccggttgtgtcggttaggcggcggcgggtgggaaggaagaatggcggcgggcggcagatccatcgcgtgctttgccgccgtgctgctcgcggccgcgctgctcctctccgcaccgaccaccacagaggcctacgattcgctggatccaaacggcaacatcactataaaatgggatatcatgcagtggactcctgacggatatgtcgctgttgtcacaatgttcaattatcaacaatttcggcacatcggggcacctggatggcagcttgggtggacatgggcaaaaaaggaggttatatggtcaatggttggggctcagaccactgaacagggtgactgctcaaagttcaagggcaacaccccccattgctgcaagaaagatccaacaattgttgatttacttccaggcactccatacaacatgcaaattgccaattgctgcaaggcaggagttataaatacctttaaccaggacccagcaaatgctgcttcctccttccagatcagtgttggtcttgctggaactaccaataaaactgttaaggtgccgaagaacttcactcttaagactccaggccctgggtacacatgtgggcgtgctattgttggcaggccaacaaagtttttcactgcggatgggcgcagggtaacccaagctctaatgacatggaatgtgacctgcacatattcccaatttcttgctcagaagactccgtcctgctgtgtatctctctcatcattttataatgacacaattgtgaactgcccgacatgctcatgtggctgccagaacccaagtgggtcaaactgtgtgaacgaggattcacctaatctacaagccgcaattgatggtcctggtaaatggactggccagcctcttgtacaatgcacttctcacatgtgcccaataagaatccactggcatgtgaagctcaactacaaggaatactggagagtgaaaatcactatcacgaacttcaacttccgcatgaattacacacagtggaacttagtcgctcagcatccaaactttgataatatcactcagttgttcagcttcaactacaaaccacttactccatatgggggtggcataaatgatacggcaatgttctggggtgtaaaattctacaatgatttgctgatgcaagccggcaaacttgggaatgtgcaatcagaactgcttctccgcaaggactcacggactttcaccttcgaaaagggatgggccttcccacgccgagtgtacttcaatggtgataattgtgtcatgccatctcctgaaaattatccatggctgccgaatgcaagccctctaacaaaacaagcattgacactcccactcttgatattctgggttgccttggctgttctgttggcttatgcatgatgagtgggatcaagatgtttagcaagcttcaagttgatgtcggattccatgaggtgcactgcaacgggatatttattcattcaattccatagcggcacaggagagatgaggcgaagccaagaaaaagtggatgtgtgtgtgtgtgtgtttgtaagttaaagggccaaaatgtatttcttgtctggtagtatatagcagctctacaacactttggtgaacttagttactgcaaattaggcaattacagttgcaccttttgtattttatagcaaacccagacttctattggattctatgactgcccctcttgtagtaaacgcaaggcttcactggtactcctgtttaaagattggtcaaatagaagagacgacggtgattgtctgattgagataactaagttctggtgtcttgatccatttgaccattctgctgcaaagattattgagctaaattgctaataacaagtgttaactgttgactgaaccaaaattacgtgtgcaaaagaaacaacgaaccacaataagactgtctgcagtagataagataaaggagacgcaggcactgtttacatagtagagtttaaaatattacaattatatgtctcatgttttactctgtttattatagatagtctgagtccggcagcgggtaccggaaacgtgtcgtggatgcgtattattcgcggcgtgtggccctgtggatgcatccagcaggtgaggccatggacgtgcctgctatagaaagagagtgcggtaacatccgcatcctctctcctctgtccattcacatcttccctgttttcgtcggtacagacatgctgacgcgcagtccgaatacggtagctactggatgacgggcctcctatccgcgctcgctgatgggtcccactgcagaacgaggtgttttccgcgttggggctgtctccaccaagggccctaatgccgactccagcaagaatcgctgcatggttctgaacctcagctaaaatagagtacgagcagcgcatgcaacgatacgattcttgtttcgctattatttattaagagaatatagtatgttaatatagttggtatattatagaggataaaatttagaatacgctgctggagatggtaaagatatagaagacgatttttttagagtgaactg

SEQ ID NO: 5197 - DNA, 2687 bp, Zea mays
ctgtatggttattccatcaaacaaagagtctgctgttgccaacaaaaaccttgaaggtgtcgcagaaagtgatgatgatcttattgatggtaccgctgataatgttgtatcgggacctaagattgccaacatggtagttgatgaggtgggtttcaagatggcacctgctaatagaagttcacctggtgacccctctgatgactcatgtgtcattcctgaaagtaggcctcaggattatgctgtaaagagctatgagggagttggtgattgtggtgtgactgaagtgtctaagttatgtagtgagcctcttaacaaaccatcagataatatatgtgcaactcaagatgttcctacaaatacctctactatgtctgctggtgccagtgaagtgtctagttcgtggagtgagcctgttaccgaactgatcgatgacagatgtgcaactcaaggtgttccagcaaatgcctctaccacgtctactgttgtaccatctgttaaactctggacaaatgctgggctctttggacttgaaccatccaaacctccagtatttggtaatggtccaagggaggatactccacctggttttaaagaagctcaaccagtccattcaactgaattcacagaagtgcactgttcaaagccaactgaatcagcagctgtagatgtcccaaatggaaacacatccattaccagcagctttgtggaaaagcttgttggtattcgtcctggttctgcaaacctcaatagctcaggggcaaatcaatcagcagccagaatacctgatccaattcatagtcatacagatgggcactcagatttttcgtcatcctctgtgcgcacctccaggccggccgggcatacttcaataaacgaacttctagaatttgaggggagtgctgatactggcaccaaaatatactcaactgacatgagaaataacgctgtgtctgcatcaagcttttcaagcattgcacaaaggtttcttgctaatacacttcagagaagaacttccaaatatactgatcttcctatgtcttctgagagggcaaatgctgatacaagtgcaaaatctgaatctactctaaatcctgttgtagaaccaagtgaagcggtatttgcagaggaaactaagtttgagaacaaaacagaaaatggaatggatggattgtccaaaacatcaatattttctagccgccattactctgagaaatcgtctccgccacttgagtacatgaaaatatcttttcaccctatgagcgcatttgagatgtcaaagctgaacctagatttctgtgatggaaatattcatgaaatttctgatgatatgatgttaccgacatttcagttactttcagagtcttccattccacagccaggcagtggttctgagtctgaagatgacacctttggtaggtcatatagttattcttcatatgatgatctgagtccccggctatattcaaactctgaggcatgggatcaagatgatggaactggactggaggaacatgagttatatgatgattcaaatcagataggatcctcaacagcacctttatctagctacatgggattcgagcagatgaacttatctgacatgaagtcagatatttcacttgcaaacgttggggatcagaatgtaataggcactttacaatcctgtactgttgaagaacttccaaactttgatacattgatgtccagaagtgatgatcaaaatggtgaaacccccattccacataatctggggaatatgacaccagatgaagatcagttgccaccaccacctcctctccccccaatgcagtggaggatgacaagacaaacaacttcactagaagaggaaacttgcattacaactaaagatatgcttagaaaaacttctagcctaccacatatacacacctctgcccaggaagaacactgtcctccaactgcaccattggatctacaagggcatgctggggaagtgggtgtccagaaaactggtggggtacgagaaattactaatcctcctagtatcatcgatataaaatcaagtttgcttcagcagatcagggataagtcagagcagctgaagcttaatggacatgaaaggtcaaaaaaagcagtaggcggtgacattaaaagcttagacgaaagggaggagttgcttcagcaaatcaggagcaagaccttcaatttaagacgcacaaacgcatctaaggcagatggctcatcacaatctacagccagttccaacgttgcagcaattttggagaaagccaacgctatccggcaggctgtggccagtgatgagggtggcgatgatgatacatggagtgatatatgaccacctaattgcagacgtgcatggtagtcttttcctgtatattaagctattacaagatgaagtgattaaatgtgaataccatccttttcttcattgtaattagattttgcaggtcttgttttgtaccttccttagttcatattagtgaatcctaccgtaggtcgctgtggtcgtggaaatgtcagagcatttccacattatgtaaatgcatctttattatttatttatgatagtgagaacagctgaatagctgataaaaataagcatactaatctatctttttatcattgtattgattttttttgcaatgataataagatggagcatgatgttgcaaaaaaaaaaaaaaaaa

SEQ ID NO: 5198 - DNA, 1245 bp, Zea mays
cagagaaaacaatagctgcatactacaatcttttgaaatattcagttttttttggttggttcggatggagctgatcaaagtcatcgttctgctaaagtttaaaaaccaacaacgtttgcatcatgtcaggtacagagtagtagcatacagtgatctcctcaaagaacagagtatttgtaaaaatatggaagggacagcaatgctactagcacagggctcataatccgtacagcaatcttttagctcgagctctgcctttctgaacgtttcaagtgcagaatccgattcactctgattttgccggagaacaagatcggggcagactcttgctcctggcaggactcctgcttgcagacttgtcacgccggggagaaataggaggggatctggatggtgatcttgccttaacaggtgattttgactctgaagcagatctagatcttgggctcctgctcttgctataactgcggcttctgcttcttgagtacgaatggctgtggcttctgcttcttgacttagagcggtttctgcctctggagcgagaacggctgcgcctagcatcatactccctcacccggacatatgtccttgaaaaagcattacggaactcagaatcatctagcttccttatcgcgtgtttcatatcttcatagttagtataatcagctattccaatagttgctccagcctcacgatacacatcagtgaaacagacatcaccagctcgccgcatatggtccttgagatcttgccatgatgctgaagaaggtaatccagtaaccataacacggtaatcagaacgttttgaggcaccgcgttgtccagcactgctatagctgctagatcgatcaaaagaagatgtgcctcgtccaccatgggctaattccacccgcaacctatggccatcaaagttgtatccatcacggccatatattgcatcttcagcatcacgtgcgtcctcaaactcaacaaaagcaaaaccaggaggccttggtggaattttcaagtcaatttccactatacgtccatacttgtagaagagatcatccacttccctctcgcggatgtcgccggggaggttgcccacgtagatcgtacagccgttccgccgggtcatcgttcctgcgacgactcgacggcggcaaggagcaaggaaggcttgagtcgaggtcgagcagcttcgacggatgccggcgtgagggtactgggaattgtggattgttcccttttacggcccgagggtac

SEQ ID NO: 5199 - DNA, 4977 bp, Zea mays
  misc_feature (488)..(488): n is a, c, g, or t
  misc_feature (569)..(569): n is a, c, g, or t
  misc_feature (605)..(605): n is a, c, g, or t
  misc_feature (685)..(685): n is a, c, g, or t
ggccacttgatcacgatgtgattcctagagatattagaactccctgttgtgcttattcgagctccgacgtacatattagctgcccatttcaatggcccgctgtaatttagtgggttacctaatggtgccattgattatttaccatcaaacattcagtgaggtttttaggatgtgatatctgtatacgagaagattacacattccacctgtgcaagtggaactagtttgtactctctgttccaaattacacatccttatgccttctcaagatacatagcttttattatgtacctaaacataatgtagatcgagagcaaaagttatatctagaaaaactagaacagacttacaatttagaatggagtgagtatttcctagcaagggtgttgcctttccagagcagaacaaacatttgagcttatgtctagtgctctcatttttttatgatattctttattttggcataacacaactttaacaaaatatgngaagattgtcaatgaatcattgtgcttacatggtaaaaaaaaccaacccagtgggggggggggggcacagcggcaccgtancccatgtgagaacggatgagtgaggccgggccttanaactttgctttggtgtgggaccgatgagaggatttttgtaaccccggcctaaattccctacaacggggaatcgaacttanaacgtaaggagtgctactcaggtcacctaaccaatttagttagaggcccttttgcgtgcttagacagtatggctgaattaccgctagtaatactatgaagtgcctgtttacaactattgtgcagttccgctccatcctcactggcaaacatcaaacttttgccatggctgaagatgggtaggtaaagttgtcccaccggtgctaaacaggttcatgtcacaatttttgtggtaaattcactaatgtgggaagtctgagtaccatgagtgtgaagttctccagacacactgatcctattcatttttaaaataaaaataaggcttcaaaaagaatgctcagatttgtaatcttattgaatatacttgctgaaaacgcttgagttcacctgtttttcatatatttaaagaattccatctgacctggtgttgttggagcatgacaaatgtcctttgtctataatgttctttgttattttgttaacatgcaatctgaaataagattgtggaaaatatattcctgtatcagttgttttggagatattttcaaatgtatagttcatacttctcatctgaccaagttgccattgataagtctgggatgccaacttacaactattgggcaattttggtcctccatctttgtgttatggactttttctgttagactgacatatatggtgtgtgtatatacggtatgggtatgtttaaggtatagcagaccggcccatgtatatgttagattgtcatatatggtatgggtacatgccaggtatagcaggccagcccttgtatatgattggaaagatacgagaagatctcatctggttctgtttccataagccacaagatctctcccttatttatatggtctctccaataaatcaatccattattctacgctatttcggttgctttctggtatcattcgtctaggtttagcctttcgccttttgccaccactgctccttgtgtgcgcctcatccactgtactggctactatggctggtgatcctcctgcactgcctcctggcgctgctgcttttcgcacagccgtcggcgccggcacgatcactgccgatatggaggtgtggagattcttcatgcactcgttcctgtacgtggaatattttaatcagcggtgtagctcatgttcagatcatctttgcagttcatttttgtgtcttacacttagaatttgactgctccaatgtgctccattcaatttatgcgagcagtttgatttccgtgtatacgcttgggctgctctaacactgcatactttgtactggtcttgaatgagtctgacccccattggacctagaatggggaacagatgtccttttttattcttatatgttctttaatcattgaagcatgacttgaaataaaaaaatatggaaaattgtataagtatcactgtgtccggagagctttccaaatgtatgactgcaggtttcccacttgaccatcttaccactaataatattgtggaatgtgcctgtgaataactccatgtgtgatagactgatagttcatatacaggatagtgtcacagtttttgtggtaatttggcagcatgggaagcctgagtgctacaggtgcaaagctcttcacatacactggttcttggtcaattttttctgaaagaaactagaaagctttcaatggaaaccctcaacttgatggcttgatgctttgttctgttcttcgacgagtcttgctgaatacacctgagtttgcctgaggttctcaaattcagaaacactggctaacctagaaaggttggaacaagacagatgtccttttccatgcttttagcaaaggagagcctaatataatatatttcctggctggttcacctcttaaggtgtcatgtgccaaccttgggtggaacagtctccacattgggagtggtggccagtgcccttggatagaggctctgcagcccattacctgtgcacaggtgtagtttggttcgggactgactggacagaaagtagaggtagagttctgctagtggtaaaccagttatggtcacattttttgtgttatatatggcggcagtgtggataatcttaagtgctcggagtgcaaagctctcgcacactgagccatggtctatctgtgttagaaaactggagggctttagaggagtccttgacttggggctctgtactgttcttggaagagacttgccaaagtacctcagtttatgggttttgcaaaaataaacccaggctgtcctaatgatgggaacaacagaatgatctagtttggtgaccaatttcactatttggctacaagggaagtgaatacatggagggaacatgtaaatccgtcgagaaataattcaaaacttgaatttgtatactcatttcatgtaaatggcatcaaatcttccccaacgtcattaacagctgtgggtcacttccgcaagctgagaactgacaccatgcattgcatcttggtttccatcccactgcagctcaaaagatgttacttacatgctgctgctgcatgttgtcaaacataagtttcttgggccatctgtttatctttttgggacactcatgtttgaaccgtacggattcagcttttgtacaaggtatggtcaggaaaatatgtatgttttgcactaggcatgtaagtagtgcttgggcctaaattcagtcactgcttgatgtatatgatccatagttttaacaattaactataaattgtaactgaatttgatgagttctgtgctccacacttttaacagttaactgtgagttgtaactgaacctgatgggttctatgcttcaagcgttcgaccttgggggccaccagatcgcccgccgcgtctggaaggactactacgccaaggttgatgctgttgtgtacttggtggatgctgttgacaaggaacgttttgccgagtcgaagaaggagcttgatgcgcttcttgcagatgactcccttgcaaacgttcctttcctcatactgggcaacaagattgacatcccatacgcggcttcagaggaggagctgaggtactacctcggcctgagcaacttcacaaccgggaagggcaacgtgaacttggccgactccaatgtccggcccctggagatcttcatgtgcagtgtggtgcgcaagatgggctatggcgaaggcttcaaatggatgtctcagtacatcaagtgagtcgctgctgtcctcttttgtccatggcgctgctgctttcgcaggagggttgaaatcaagtctggtcgtgacatggcagctgcatggaaaggtttatggtagctagtgataggcaaagcttgtaagtcggtgttaatcctagatatgtgatgtggggtctactttctcttctgattgtttcttggggtggtctaaacggttcaaaaaaaaatgcgacttcttcgggtcagctagaagttatgtaatcacgttacatgaagcagcgcattgttcgccagctgctttggtgtggtggacttctgtcggtaatggtgagcttgcggtttctaaaagtatgcgtgtagactgtggtaattgtgtatctacagattccaaaccttgcatttgctgttgactgaggtagcccggaaatgataaaacatcctggtgaaagttgcattgctttcatgttgcgttttcgttggaacgaagcagcacaccaacccgaacgctgctattcatttcaatttgaacatttaaaagcaccttgggcttcgtttggctaaccgtgtattgtacacgcattgttagagcatctgagtcctaaacggagttgtaggacatcaaaaacttgctttaatagggttctattttacaaaaaaaaaatatataggaaatattaaataaatataggactcagtctatcagatcctaagtataagatctcgtatgttcgagcacttttttatgcttctaaacactttaaattagatcctactttaaattttaggacgccgatgtaggactactggttggagacgcttttaacaattacacccgtcactataaggaaaatggccaaaataacttttattcatatgccgtaaaaaataaccttatttttggtgaccgacaccaacccatagaaaaataaatttgttattatcagtggttaggtatcagccataaaaaataagcttattattttttgtggccaggcatcagccgataaaaataagcatttattttcaatagctgacatgtgcccaccagaaattagtgttgaggaaaagggtttcatttgagggttgatttggtgacaaagggatcccgagaggatgggagggg

SEQ ID NO: 5200 - DNA, 2068 bp, Zea mays
gccccccccccccctttcttccctttttttttttttttttgaccggtcaaaatgcagagagccggcacatccgcaatcataacagctgcgtctgttttttggtgccaaatcacaagcaaactactcctcaaccaaaccatcactgccaccaccagcagccaaattaggtacaacaaggctaataatcattcgaaaatgacgttctcgcccgtttctgcaccactacaacaacaataacaacaactggaaggggtgggctgcaacccaaggggtgttcaattaccattaccattacggcattaccattaccgatcctgcgcgagaagagggagcaggagcgcaggcacacgaccacaccctaccgcctcagcactggcttgtaaagcacgacggtcacgaacttagccttgaaccggtgcgtgatccccagagcaaccatggacctcgtgttctctttctcgatgtaaaggtggttcagaaccacggtctggggctggggcagcgggctcgactcgtcttggcttggtgggaagctcagcagcgtgtgctgcagatgaggtggcatcagtgggggctcccggccttcgtcttcattcccaggaacagggttgtcgtagctggaatccggtgaaggcgggacttcaaatccaacaacgtggaccccttcatggtcatgcatgccttgttggtccatattccaacagcctgttgccttgtcctgctgggtgctcctccctggcgctcctcgtgctaaagaatttaacgacaaaaaaggaatctggactatcatgcttagtaggctcttgagggtcctcattggttttttacagaaacatctactgcagattgcatgtgttgcacacgttcactaaatgtttcgatgtcatttgtatgtaactggaagtagatgtcctttgtgctactcatccatagatttggaaatctattgattctattcctcatcattacgaagtcagacacactctatttgtccctgtattgtggtgattactttcctttgcagttaactggaatggaatttatatctggtgtaggttgagacggtctcactttaagattatctggctttgctgtgtactgcaacaagtcttgaaagcttttaagattatagaccttgttagtgcttgggttctatgtactcccgcgacctcttgcagtatgtgttcatgagacctttttcgttacatgagtagtagttacttcaagtctatgttcagctgtgcgttctttgttttaggttttggaatcgtcagagacaatctgtgataaggtttatcaggttttggaatcgtcagagacaatctatgataagatttctctgagagacaaacatacaccacatgtttataattcgaaaaggtcagtccatttatttcttgttgtactgaaacaaatccgataacagggtcaggttggtaatagctctctatgttgttggacagtgatagtagctgatttacccctgcaggcccccaccgtcaatcagcgtccctccccctaacaccgcaatcagcacacctttcctgatgcagacagtttccaatcgaagtctcttttccatctttcctgagacagttctggttgattttccatttctcttttttttccagtctgaaacgaaccgaactaatgctgcaacgtaccttacctttagaattggtgtcaagtagagtaaaactatataggataccaaaactatctttcattgtgcatttttctcaagcagagtaaatatcagcattttctacttgttagcagtgggtaggggatgcacatgtttgcgtgtaggactgtgaataacaccgatgtttcacatatccctaataaccatcacccttatgcagtttgattctgatgcaattagttcatggatggatatgtttttgcgctgtccatctctagaatgagttaaaacatatttcttgctcatgggagtactgcaactgtaggccattatctggatgtctgcagtattatctcaggcaatactactttgtttgtaggaaccaccgccagcaaccatgtcccactcgttgagccttggcgc

SEQ ID NO: 5201 - DNA, 3905 bp, Zea mays
  misc_feature (3875)..(3876): n is a, c, g, or t
  misc_feature (3883)..(3883): n is a, c, g, or t
gcggttggaggggggcgatgcggactccccgtacagctccacggcggtcacagcggcggaggaggaggaagtgggggagagaggtggaggaggagacgaggtggattcagcggccacggcgacgccgaggcggttgtcgccgagggcagcagcgagccccacggaaggcgacgcccggtggggtgacaccagctcgtacggcgctaagaagaagcatagagttttttgtcagcttccgaatggcgattgggcattatgcacacgtcaattacttcctctggtgcatgagtcggttgtaaaggtttctgaagggaaggtactgagattgaaaaccgagtgtctacaacctgcaaatcctgaaattcttgatggagtggatgatcttatgcagctaagttatctaagtgaaccatcagtactgtacaatctgcagtacagatactccaaggatatgatttatactaaagcaggtccagttttggtggctgtcaatcctttcaagaaagtttcactgtatggtaacgagtacatcgatgcatatagaaataaatcaatggatagtccacatgtttatgcaatagcagatgcagcactttgtgaaatgaaaagagatgaagtcaaccaatctataattataagtggtgagagtggagcaggaaaaacagaaaccgcaaaaattgctatgcagtacctggcttcccttggaggtggaagtggcattgaatacgaaattcttcagacaaatccaatactcgaggcttttggcaatgcaaagacattgagaaatgataactcaagtcgttttggaaagcttatagaaattcatttcagtaccactggaagaatatgtggtgccatgattcaaacatttttgcttgagaagtccagagttgtgcaatgtgcagttggtgagcgatcataccatatattttatcagctgtgcgctggtgcacctgcctctctaaaagagaagttgaatttgaaaaaggtggatggatacaaatatcttaagcagagctgttgctattcaattgcgggtgtggatgatgcccaaatgtttcgaactgtgacgcaagctatgaacattgttcatatcagcaaagaggaccaagagagtgtttttgcaatggtctctgctgttctttggctgggggatgtctcgttcacagtaattgacaatgaaaatcatgttgaaatcatagtagatgaagcttcgaaaacggtttcagaacttcttggctgcagtattgaagatctcaatttagctttatcaaagcgccacatgaaagttaataatgaaaacattgtccagaaacttacccttgctcaggcaactgacacaagagatgctctggccaaatcagtgtatgccagtttgtttgagtggcttgtagaacaaattaataagtctctctcagttggcaagcgtcgaactgggagatctatcagtattcttgatatctatggctttgaatcatttgataagaacagttttgaacagttctgcattaattatgctaatgaaaggttgcagcaacatttcaatcgtcatttgtttaagcttgagcaagaggaatatgtggaggatggcatcgactgggcaaaggttgacttcgaggataatcaggactgtttgagcctctttgagaaaaaaccactgggactattgtctgtgctcgatgggccccccccccccccgaatgccacagatcttacttttgcaaacaagcttaagcaacatcttgactcgaattcttgcttcagaggggaaagaggcaaggcatttgctgtccgtcactatgcaggagaggtggcttatgatacttcgggttttctggagaagaatagagatttattgcacatggactcgattcagctccttgccaaatgcaaaacttctctgccaaaaatgtttgcatcgaagatgctagttcaatcagataattctatgtctgctccatatagatctagtgctgctgattctcaaaaactaagtgttgccatgaagttcaagggtcaactgttccaacttatgcaaagactggaaagtacaacgccacactttattcgttgcattaaaccaaacaatttacaacttcctgcaatttatgaacaaggacttgtgcttcaacaacttaaatgttgtggggttcttgaggttgtccggatttcaagatctgggtatccaacaagaatgactcaccagaagtttgctcggcggtatggttttcttcttgaggatgttgcatctcaagatccactcagtgtttcagttgcaattcttcatcagttcaacattttacctgagatgtatcaagttggctacacaaagttgttcttccgaactggtcagattggcaaccttgaagatactcggaatcgtactctgcatggtattttaagggttcaaagctgtttcagggggcatcaagcccgtcatcatgcaagagaacgaacaagaggagttttgactcttcaatcattcattcgtggtgagaatgcacggcaaatttactcctctttgttgaggaaacatagagccgcagttgttttgcagagaaatgtgagatgttggcttgcaagaaggtatttcataaatgtccggaaggcctcagtgataatacagtctggtattcgtggcagtcttgttcgaagatgtaatggcaatattgatctaataaatgtgctaagagagtttgaatcaaaacaggaggcacatggtgaccaaattttgatcaaggcctcagtcctggctgagttacagaggcggatactaaaagccgaggccacagtacgtgaaaaggatgaagagaacgagatgcttcatcagcggcttcagcaatatgaaaaccgctggttagagtacgaacagaaaatgaaagctatggaggaaatgtggcagaagcaaatgcgttcgctgcaatcgagcctttccgtagcaaagaagagccttgttttggatgaaacgcctaggatgtcggactcatcagtggatcagagctgggaaagcaatgggaaccaccatgtcagcagcggttctcagctggtgccacacactggtggacgtgaaatgaacgctggcctcagcgtcatcagccgcctggcagaagaattcgagcagcggagccaggttttcgctgatgacgccaagttcctggtcgaggtcaagtctgggcaggcggacgccagcctaaacccagacatggagctccggaggttgaagcagaacttcgactcgtggaagaaagatttcagtggacggatgagggagacgaaggtgatcctgaacaagctcggcaatggcaacgagtcatcgcccaactctgtgaagcggaagtggtggggcaggctgaacacctccaagttttcgtgagtttattatgtattaattggtaatttgtagatgtaaccggtattttacacgccggtgtggttctagcttcctagagtttctactctacgggtgctgtgaaagtccagtgtgttggactggatttgtattccacggagggcgagttgtatagttctcccacaatggcttccttttgaggggtcaaggaccactgaattgtgatgtaattacttgctgaagtagctgtcgaaggggggagattgtgagtgcttaatattccactatcctcgtgctttactttctgcccctcgcccgaagcacatcccgtcgcatcccatcccactaccacccatctcgtcgtccgccgattcgatccggttcttccaacccaagggcagtgatggcgacgaagaggagcgtgggcaccctcggcgaggcggatctgaaggggaaagaggtgttcgtgcgcgccgacctcaacgtcccgctcgacgatgcccagaagatcaccgacgacacccgnnatcgcgnctccgtcccccacatcaagttc

SEQ ID NO: 5202 - DNA, 1981 bp, Zea mays
  misc_feature (806)..(806): n is a, c, g, or t
cattgggtacctcgaggccggccgggatccatctatccatcaccaccacctcctccttcccacgactcccgagcgctctgcgtgtggcgcgcgcggcagcatggcgactgcgaacgggagcagcaaggggtcgttcgaggtgcccaaggtggaggtcaggttcaccaagctcttcatcgacggcaagttcgtcgacgccgtctccggcaagacgttcgagacccgggaccctcgcaccggcgaggtgatcgccagcatcgcggagggaggcaaggccgacgtcgacctcgccgtcaaggccgcccgggaggccttcgacaacgggccctggcccaggatgacgggatacgagcgtggtcggatcctccacaggttcgcggacctgatcgacgagcacgtggaggagctggcggcgctggacacggtggacgccggcaagctgttcgccgtgggcaaggcgcgggacatcccgggcgccgcgcacctgctgcgctactacgccggcgccgccgacaaggtgcacggcgcgacgctcaagatggcgcagcggatgcacgggtacacgctcaaggagcccgtgggcgtggtgggccacatcgtgccctggaactaccccaccaccatgttcttcttcaaggtagggcccgcgctcgccgccggctgcgccgtcgtcgtcaagcccgccgagcagacgccgctgtccgcgctcttctacgcgcacctcgccaggggaggccggcgtccccgccggcgtgctcaacgtcgtggccgggattcgggcccacggccggggccgccgtcgcagnccacatggacgtcgacaaggtcagcttcaccgggtccacggaggtcggccgcctcgtcatgagggccgcggccgagagcaacctcaagcccgtgtcgctcgagctgggcggcaagtctcccgtcatcgtcttcgacgacgccgacctcgacatggccgttaacctcgtcaacttcgccacctacaccaacgagggcgagatctgtgtggccggcacgcgcatctacgtgcaggaagggatctacgacgagttcgtgaagaaggccgccgagctcgccagcaagtccgtggtcggagacccgttcaacccgagtgtcagccaaggcccccaggttgacaaggaccagtacgagaaggtcctcaggtacattgacatcgggaagcgcgaaggcgccacgctggtcaccggagggaagccctgcggcgacaagggctactacatcgagcccaccatcttcacggacgtcaaggacgacatgacgatcgcacaggatgaaatctttgggccggtgatggctctcatgaaattcaagaccgtggaggaggtgatccagaaagcgaacaacacccggtacggcctggccgccggcatcgtgaccaagaacatcgacgtcgccaacaccgtgtcgcggtccatccgcgccggcgccatctggatcaactgctacttcgcgttcgacccggacgcgccgttcggcgggtacaagatgagcgggttcggcaaggacatgggcatggacgcgctcgacaagtacctgcagaccaagaccgtcgtcactccgctgtacaacactccatggctctgaccgacctcatcctgtccgatgaacagttcaacatcacaaacaagaagaaacatgtcttgtaagatactcctccaaaggatcggttgcctgtacctgtactcttacacctgcatggattgatgatgcagtgcaatgtagcattcagaacaataaagacatgtttcggactgctggtgtctgatcggttgaagagcatgtttcagtattactatttcttttcaccgacaaccgcgttggtttctgcggcccattttttggtgcctattttcgcgataggaacttatggcaatataatgcttggcatatcatatccaaaaaaaaaaaaaaaaaaaaaaaaaaaaaaaagaaaaaaaaaaaaaaaaaagcggcc

SEQ ID NO: 5203 - DNA, 2205 bp, Zea mays
gcgcggcgctccgggcggccggccgggaatctcgataggggtgcgcgaggacgaggagaaaaaacagaggaggaaaaaatatcaccttctcttcctgcattcccctgctcgatccccggcgaggaattcgcccccgaatccatcgatttgctcagtccagtccgccgatccgtggatcgattcgtgcgtgggctctgtcctccccggggttccgatctggtcctcgcctcgccggaggaggagctggaggagatgaacggcaccgggggcagccaccaccagcagcagcacaggctccggcagcagcagcagcagcaggcgctcctgatgcagcaggcgctgcagcagcagcagcagcaacatcagtaccagtccggcgtcctcgccgccgcggcagccgcggccatgacccagatggaacctatttccaatggcaatcttccacctggctttgatccttccacttgtcgcagtgtgtatgttggaaacgtgaaccctaatgtcacggagagccttttgattgaagttttccagagtgctggccttgtggaaagatgcaagctcatacggaaagagaagtcatcctttgggtttgtggactactatgatagaaggtctgctgctctagcaatcatgacccttcatggccgtcacatatatggacaagcaatcaaggtgaactgggcatacgcaagtacacagagggaggatacgtcggggcatttccatatttttgttggtgatttaagttctgaagtgaatgatgcaactctttatgcctgtttctcagcatatccttcttgttctgatgctcgagtcatgtgggacaacaaaactggacgttccaggggttatggttttgtctccttccgtaatcaacaggaagctgaaactgctataactgaaatgactggaaaatggcttggaagcagacaaataaggtgcaattgggcaacaaagaccaattcagaagagaaaccagaaactgacaatcataatgcagttgtactaacaaatggtagctccaccaattcagcaacagatgcaagccaggatgcaggaagtaaagagaacccagagaacaatcctgattgtactactgtatatgttggcaaccttggacatgaggttaatcgggatgagcttcaccgccacttctataacttgggggtcggggcaatcgaggaaatccgtgttcaacaggataaggggtttggatttgtgagatatagcacccatggggaagcagcattagctattcagatggccaatggattggtagtccgtgggaaatcaattaagtgctcatggggaaacaagccaactccacctggcaccacctccaagcccctaccccctccagttgcttcataccagcctgctgtagcaatgtcaggtgtcccacaaggtttcacagcagccgaacttcttgcttaccagaggcagcttgccttaagccaggctgcagcagggcagattgctggccagcatggtctcgcgggtcaggtttctgcaggtcttcttgctgctgctggttctcaggccctctacgatggctacccgaaccagtcatcagcccagcagcttatgtactacaactagagttcaagaggacggcgttggccatcgtcgccctgttttttattttgtggttcatgtactatttgtgtgagagttcttgatctcttgtcgccgcggaattgtgttactatcttattactgtaccattgaccatttttcttgtgagatccatttgagtagtcactttaacagagtaagagatgtattctatgtgacttcgcgattgattaatgtaatgctcccctgtgcatcggctttggtcgctgggctggttcctaacctggtgctatggtgcggttggacattgagagttttactcgtttgtagtttggtgttctggttcgtgagtctcatgtgtggttgcatatgttcacctaacctcagaaattcatcgttgtgtccatacaacaagatggaatttattttgcaacctgagatgccatgagagccctttctggtccttctggaatgtaggtctgtcagtttgccatgggaactgttcactttccgtcaggcgtaaatcatcactggatgtatcacactgaaattcagagttccagatatgcctgtgactgaaggttcagtagtcgcaatcccattctgcgatggaattttctgggcagc

SEQ ID NO: 5204 - DNA, 2042 bp, Zea mays
cattggggcccccccccccccccggagctgacaaccagacgcgccagggtttcaggcttccacgaatctccccgccgccctcaattcccctcggcgccgccgcctcctcccctcgcttcggtcctcggttagttaaccatccaggttctgtcaagatgtctgatagccatgagactgacaggaacattgagatttggaaaattaagaaactgatcaaggcattggaatcagccagaggcaatggcacaagcatgatctctctgatcatgcctccacgtgatcaggttgctcgagtggctaagatgttaggtgatgaatatggtactgcttcgaacatcaagagtagagttaatcgtcaatctgtgttggctgccatcacctcagctcagcagaggttgaagctctacaacaaagtgcctcctaacggattggttctgtacactggaactattgttactgaagacggaaaggaaaagaaagttactattgattttgagccattcaagcctatcaatgtatcactctacctttgtgacaacaagttccacactgaggctttaaatgagctcttggaatctgatgacaagtttgggttcattgttatggatggtaatggtactctttttggcacactaagtggcaatacccgtgaagtgcttcacaaattcactgttgacctcccaaagaagcatggtagaggagggcagtctgctctgcgttttgctcggcttcggatggagaaacgccataactatgtccgcaaaacagctgaacttgctacccagtttttcatcaatccagctactagtcagcctaatgttgcaggattgattcttgccggttctgcagattttaagactgagctgagccaatctgacatgtttgatcagcgactccaagccaagatacttaatgtggttgatgtttcgtatggtggcgagaacggtttcaaccaagctattgaattatctgctgagattctagcaaatgtgaaattcattcaagaaaagaagttaattggcaagtattttgaagagatcagtcaggatactgggaaatatgtctttggtgttgatgacactctgaaggctcttgaaatgggtgctgtcgagaccctgattgtgtgggaaaatctggatatcaacagatatgtgatcaagaacagtactactggggaaattattataaaacatctgaacaaagagcaggaagctgaccagagcaatttccgtgacccatctaccaatactgatctcgaagttcaggaaaaaatgtctctcctggaatggtttgccaatgaatacaagaagtttggttgctcgctggagtttgtgaccaacaagtctcaggagggatcccagttctgtagaggatttggtggcattggtggcatgttgcgctaccagctggatatccgttcttttgatgagctttctgatgatgacgatgtgtatgaagactctgactagcaatcagccaatctcatgccatgtgctggcccatggaaggacgcaacagctcgacctcgccatacctacgcaggagcacacgaaaagcaactatccaaggattaatgggcatgggccagcgtcatcctcttcaagaggagcttaagactaagatgattttgagtcacaatcatgggagtaacgtgacaagaagataccctactatatcacaattattccagtaatgcgtcgagaagataccgttgtttaagtgcacaaaccaatacagtgacgtgccaagaagttaccgtattttaaggatgtttaattttcagtattcgtcggggtagtactgtgtcaaaaacttatttgtacctaaaaaggccaaatattgccgttgccttggtgctttatgctatgttatcgtcttttgtgagtctgtgtgctaaggttgttgcttaatgctttgtgactcgcaagctgctactcttgcagtttttgcaacgacgaagctatgatatggagtacaattctgtgtcaacaaaaaaaaaaaaaaaacaaacaaaaaagtactctgcgttgttaccactgctt

SEQ ID NO: 5205 - DNA, 2595 bp, Zea mays
cccacgcgtccgccctcccggccgccggcgtccaggccagagtccaggctccaggactaccaccacttcgtctcgtcctcacacctcactccaccacctctgccttgcaaagccttccaccgatccgccgcctcgtccgcgcgctcgcaggcagcagtgtggactacccgccccatactccatcccctactcgaaggatacaccgtgagtaggcgtgatggtgcttgataccccgttttcgtgcagcttgttgctaattcgttttagtttgagggatcaagaaccaccttgttctttctttctttctttcttggaacaattatgatgaatcattgcaaatctcttgaatatatttttcactgtaaaatactgccttgcctttgagctccttggttcacgtgcaatgtttctttgccctccgattttgcaggacctcgagttaagttgggcgaggagaggtggttcattccagcagggatccttctcgtgagcccagtcgatctgaccgtccttggtatctgggggggttgttctgtactctctctttaattttagtgctgggatgtatcgcctttgggattttctgggtgatggccgtcttccccaccgtcccgttcatgcctgttgggcggacggctgggtccctccttggtgctatgctaatggtcctgttccgcccccgcgtccccggaggacgcgtacgccgcgattgacctcccgatcatcggcctgctcttcgggacaatggtcgtcagcatcttccttgagagggctgacatgtttaagtacctcgggaacctgctctcgtggaagagcagaggcagcaaggacctgctcttccgagtctgcatcgtgtccgcgtttgccagcgcgcttttcaccaatgacacatgctgtgttgtcctcaccgagttcatcctcaaggttgctaggcaaaacaacctgccaccacagcctttccttctggcccttgccactagttcgaacatcggctctgctgccacgccgatcggcaaccctcagaaccttgtcatagctgtcgagagtgggatctcatttggccagttcttgctgggagttttcccagctatgatcgttggggttctcacaaacgctgctatcctccttttgtacttctggaaatacttgtcggtggagaaggatcaggagggtgggcagcccacaggaccagaggtggttgccgacgatgaggttacttcccatcggttcacaccggctagaatgtcacatgtttcttctctgaatccagatgacatggattgcgtaagcgaaccgatcatcaggagcaacagtgtcagtactactgggaatgagaacctgagaagcagaagcatcaattctgaggctgacattcagcttgcgatcaagtctctgcgggcatcaagcatgtcgcatgagatggtagaggtctcgacggttcctgatcggagagatgaaggtgcatcctcaaggaagttcacaaggactgctagccagcaaaggagcgtgataatagaggatttagcaccctccccagagattaatggggaaaaggagaaagaaactgaagttgcagagaagagatggaaagtacttgtgtggaagactgctgtttatcttatcactctcggtatgctcattgcacttctaatgggactgaacatgtcctggactgcaatcactgcagctcttgttcttctggcactcgattttacggacgcacaagcttgtcttgagaaggtgtcatattcactgctgatctttttctgcgggatgtttatcactgttgatggcttcaacaaaacgggcataccgaacacactatgggagttagtggaaccatattcacgaatcgatagtgcgaaaggtgttgcacttcttgccgtggtgattcttatcctttcaaacgtggcctctaatgttcctacagtcctattgctcggtacaagagtggctgcatcagcggcttcgatttctcatggttcagagaggaaagcctggctcatccttgcatgggtcagcaccgtggctgggaacctcaccctcctaggctctgcggcgaatctgattgtctgcgagcaggccaggcgggcccagttcttcggctacaacctcaccttctggagccacctccgattcggggtcccgtcgaccatcatcgtcacggcgattggtttgctcatcgtcatcagttactgaaacagctgaaggcaaaagagcgtagtgtaagagaagcagaatggataaaaatccttccaataagaagtacatgtaaattaggcttgccctataactcaagtgtgtatcggtacgttatgtctccgtctgtgctcttgctcgtgagcaagcagcacatggctgaccgtgtagcttgcatttccattgcataataggcttatgaagaatgctttggtaatatgattttacagtctgacaaggattgtgaagcagaggcagtgtaccatcaagataatacttctggaagcatataaaaaaatttcgtatatttggatttcaaatccagtctgcttcagactggaaattcatattatcttctggaatcgtgctttattgtcagaaacatgggctaaaatt

SEQ ID NO: 5206 - DNA, 1574 bp, Zea mays
attgggacctcgaggcggcaggaagaatacagagaagctgcgaagtaaatcttggcaagatgcattaaggattgtgatgatcagcgtaaccaatcatttcccttcatttgaagcccttgctttggttcagatagaacggacactagaggatatatcacagaaactgcaactggttcaacgtctccatactcgctttctcttacttcccaatctccaagatgttacaagaaccatccagcgtccttctattcatgaatggtcaagcaatggaatgcaccgaagcatttgtttcgtcaacaaagctacgggttatattctaatcgcagagcccccaagttttttgacgatatatgatgttatcgcaattattgttagtcacaggttaggggcaccaatgatcttgccgattgcctcagtgtttgcatgcccagatggttcagagaaagaagtccttcaaattcttcacctgggttcagactttggagtttcaaaacgtgaagggagatacgacgcttcccttggagcagaattgttatctcaggatgctcggcaggtgcaattccttccattaagaccgttctatagtggtgaaattgtggcatggaagacaggcaaagagggggaaaagctcaggtatggtagggtccctgaagatgtaagaccctcagctggccaagcactttacagatttccagtagagacagctcctggcgaaactcgcatgatgctttccagtcatgtttactcatttaaaagtgtttcaatggctgatcttctgtctgcaccttcccaagtgaatggtgatgtggcattaggtggccaagagaaactcttggccaccaacactggcactgaagtcaccaaggatgcggatgctggacttgaatatggaaaagtatcttccactgaactggtacaagcagtccatgatatgctttcagctgcaggagtaaggatggatgctgagaaggaaacactctttgaggctactctttccttgcaagatcagcttaaagaatctcaagttgctctcttggtggagcaggagaaggcggaggcggctgtaaaagaggctgacgtcgccaaagcagcatgggcatgccgtatctgcctgaatgctgaggtcaacatgaccatcataccatgcggtcatgtcctatgtaaccgatgctcaagttcggtttcgcggtgcccattttgccggacgcaggtggccagaatgatgaaaatattcaggccataaaaaacattgaaggacgtttggtctgactaaccgcttcagcttgtgaatgtgttacgatatcggggctcggctcccttctggttgtgcgttgcattcctttctggtctgatgcatctcattattctccatcggtgatgattggtaatccgatatggggggtgcaagtatagttacgttgtacaggaacgatgcattgcagtgtacagattccaaaatgaaatcattttacacacttcgaagggcatcgatgtctgaagctggttttctcgtgcaatactttcagagtcaacactacactgccctggttatccattcagcatgtatggtggtg

SEQ ID NO: 5207 - DNA, 1210 bp, Zea mays
cattgggtacctcgaggccggccggggtacctcgtgcccgaccccggtgtccatcttcgaattcgagctcctccatcttccttcaccctcctctctctcgctgtttgaggagaactacctgctcctgctccctcttccgctcctccgcgctcccgctcgccatccccaggcttcatttcggacggggatggacgactacgcccgggagatgatggagctgaagacgctcgtcacccgcaccctcgagaagaagggcgttctcgccaagattagggctgagctaagagcaagcgtgtttgaagccattgaagaggaggatcgggtgatggagaatgatgatggcggtaatcctgctttgcttggtagctgtaatgaccgggctaagcaactgcatgcttcaccttcaggtaggttactaactgcacttgtttgcgaatacttggagtgggcgcaattaagtcacacaatgaaagtttacttgccagagtgtaacctgcccaaggacttctggaagaatgaactgaaagacttctctaacaaaagtggagctgaagggagcaggagtgctgaaagtggtccactgcttttagatgttctcgaaggttatctgaaatatgagaatttgtctcaagcaaggatgggcggcaggaggatgatgagttcagaatctgatccatcactaaatgctgaacatcggagcatgaggagggcaccatcagcatcagttgggaatctgcctcctatggggagacctatctcttcttcgcagcaggcatcagatcgcagaggggggtcttcagtttccaacacaaggaaagatgagtacaactggagatacgataccaccgatgatatatctgaagaggtgctgcgggcatcgactgccctagaaagtgttcagctagaccgcaaatctcggaatctgccgacatcttggaggcattcaggggatggcgccgagtaacaagaaggctttggagctggttgcttgacttgaccgaccctgtatcatgtaatttgtatgccactcatttgtggtgcttggattgctgctatcttagaaaaagaagtggtaaactggttatgtatggttgtcttgtaacgaacaaaacaaatcaaagagttaggtgccgtttgttttacaaaaaaaaaaaaaaaacgcgaacggggacccgcccctcccaacgttaaaccatgtttgtttaagtct

SEQ ID NO: 5208 - DNA, 1940 bp, Zea mays
gccggccgggtcgggattcattcgcactactctgctcgctccgcgctctcaggctgggctgtacctgtacgtatataggtcgtcggcgacccgggcccggccgggactccacccacgcctccaccacagagagcagcagcagactcgcaagggggtagggttgtgtactctgcgcctgtgcggacggcggccggcggacggcgaaggagatggatcgcctgcccgagtcgacccggagcatgaggaagtacgcgtcggaggccggcggcctgcgcgcggcgcggcagggcccccacgggcggtcgctgacggcgcgcacggcgcacagcatgtccacgacggcgctgcgcaccaagtccaagtcggccgcgtcgctgctgcgcagggtgcccttcgcgccgctccgccccgtcctcgccaacctgcaggaggtgttcctcggcaccaagctcgccgtgctattccccgccgtgccgctcgccatcgccgcccagtgcgcgcacttcggccaggtgtgggtgtttacgctcagcctactcggcctcatccccctcgccgagcgtgtcagcttcctcaccgagcagatcgcgatatacaccggccccaccgtgggcggcctcctcaacgcgacgtgcggcaacgccacggagctcatcatcgcgctcttcgcgctcatggggggccagatcgaggtcgtcaagtgctccctcctcggctccgtcctctccaacctgctgctcgtgctcggcacgtccctcttctgcggcggcgtcgtcaacctcggctccgaccagccgtacgacaggacccaagcggacgtcagcacgggcctcctcatcctcggcgtgctgtgccagtcgctgccgctcatgctgcgctacgcggtgggcgccggcgagcactccgtcgccgcggccaccacggtgctcgacctctcccgcgcctgcagcgtcgtcatgctgctcgcctacgtcgcctacctcttcttccagctcaagacgcacgcgcagctgttcgagccgcaggaggtggacgacggctgcgaggcggaagaggacgagcaggccgtcatcggcttcgccagcggcttcttctggcttgccttcaacaccgtgctcatcgccatcctgtccgagtacgtggtcggcaccatcgagcctacctccaaatcctggggtttgtccgtcagcttcatcagcatcatacttctacccatcgtggggaacgccgcggagcacgccggagcaatcatttttgctctcaagaacaagctggacattaccctcggagtagcgttggggtcggcgacccagatctccatgtttgtggtgccgctgagtgtcattgtagcttggatcgcgggtattcaaatggatcttgacttcaagctcatagagaccggctctctcttcgtctcagtaatagtgacagcattcaccctccaggatggttcgtcacactacctcaaggggatccttctgctgctgtgctacattgtgatcggtgcatgcttctttgttacgaggcaacctgcaagtaacaacaatggcgctgggctgtcgctgccaactggcactttgagtgcacaagctgcatgatggttcaagggtcctgcctgagcctgaacaaatgagcatccaaggcagcaacgcagttgtgagtcagaaacaatgccgtgcaaaggttgatgctttcagaagcggtgaaatctcagccggtggctcagtgctatgggagaaatgaaggctagctgctgttgcaataagggtagcgaatatgcatccggtctatgtatatgatgctgtgttgtttcatttattatacagcttaataagatatatgcagagggtggatttgtataaaaaaaaaaaaaaaagggttgtgcgcgtgtacaaggcgattccaaaaaaaaaaactcgagaccggccctctcctcgtgc

SEQ ID NO: 5209 - DNA, 2777 bp, Zea mays
gtgggactgggcttttcaaatcaacagatgaagaatccccactgatatccatggacgacgaaggatggatcacaattccgtgcaaggcacttcctgaaagttggaacgacatatcagaaatggttcagttgcaggctctggaccgttccttcctttttccagttatcaggcgagcaggttcctatactggcgtgcctgtcagcttctaagcaagatgtacaggttatatccccctttagaattgccgcagtaatgtctaagaatggaacttctatgcaaaactttacaaataaatctagccctgtcagtgcaaatggtcatgataatggagcagctggagaaagtggctatgaggatgttgaacccaatggtgaagcatctccttcaggacatgatattttggagactcaatctctccttcagatggaggatcataagcagcagatcgaacatgtgttgcgaagatttagaggatcaaatttttttgtccggattgcggaatcagtggaacctctatggtccaagaaaagtgtaacttcaactacgatggcagatgaacgatcagataaccagggaaatagtaagagctcaaggagtaatgtttataataccatttctgataaaggggtttttgatggtaacacatctgggggagttgctcgagatgttgtcaagtgttattctctgcaaaatggagacatagtggttgttttgcaagtgaatgttagcgttaacaaattggaagatcctgtgcttgaagtccttcagtttgagaaaagtatatcaaacaattgtatgcctgggaatcttgtggatggacattgtgacagtaacgatgatccatgtcaggagctgcttagttggttgctccctttagatcgcacattaccacctcgttctttggcaccccctactctcaatccaagtgtatcacacaagcaatcttattctgcttctggttctcaaatattcaacttcagaagttactccatgccttcagcctcttctgttcagacaccaaataatataagaccacccccgaggccggccgggcaagaatttatgcctgaaaaacctgcaaaaaccccagatattataaatgatgggcaactttcgtttagaggagttcctttagaacctgaacggtattctgtacgttgtggtttagaaggtgtgtatctaccagggaaaagatggcggagaaaagttgaaatcattcaaccaattgaggttcattcttttgctgcaaaatgtactgtggaaaatcttctctgtgtcacagtaaagaatattgctcctactcatgcaaaagatatagtcgtattcatcgatgcaattactattgtatttgaggaggcatccaaaggaggtgctcctttgtctttaccaattgctagtattgaggttgggcatggtcacagcttgccaaacctagcactcaggaggggcgaggaacactcttttattctcaaaccagcaactatgtcctcaagggaacggaagaccaacagtcatgcacctctggccttatcactcccaacgatgaccggtgctactttaaatactcatacaccaaaggctggtgagccgtatgctgatctaagcgaccaatatgctgtactggtatcttatcgctgtaattacacagaatcgaaactttttttcaagcaagcaacaagctggcgaccctctgcagccagcgatcttatgatctcagtatcatccgaactgtctttacggaatcctagtcttggtgctcgtgttcctcaactccccgtgcagatactaacactcgaagctactaatatgacatccgaaaaccttacattaactgtccttgctcctgaagcatctggttcttcttcagttgtatccttgaactcatctccaaccaccccaaatggttcttttgatggtgttaatgagtcatcaaaaagatctgggctgggaaaagatggaattggctttcgaagattgaattctgtcctagctactccaaaagaaggtgataatggaggaaacagaatgagtaatgcttcaggctgtactcatctgtggttgcaaagtgcagtgcccctagggtgtgttcctgcccgctcaagcaccactgtcaaacttgagctgctaccattatcagatggaattatcacacttgatactctgcaaataaccgcaagggaaaaaggccttgcttacattccggagcactccttggagatacatgccacctctggtatgtcatcaggaaggtcataggataggagagcatcaagaggtatactgttctgtatattgggggcctgggactcagcctgtacaaatgagttggaaacaaccaggccaagcatgtttttttttatctcatttgtattggatggacataaggcgctcaccttggagagaaactacccccagattttaccgaaggatggttgctgccaacatggggaaactaccccagatgaatcattatgtatcacaattgtgttacaaatccattcatttcatactgaggtcgccgagacactggtgttcgtcttcacaaaggcttatgaaattcgtaacgtgttgcttagttttgatgccgttattgttgttggtggtgttcatttaatcccactcatgttgctgagttgtaccatatgcgggctctgatcataatatactggagaaatagaaacatgtgtgtccattggccattgctcatcttcatgatgatatatcagttgctcatgaatcattaaaaaaaaaaaaaaaactcgagccggggggcccgg

SEQ ID NO: 5210 - DNA, 2462 bp, Zea mays
gcacgagaccattacctagaacatcctaatcgaaaagcaaaaaggagagggagagaccgaatacaggctacagccgcttctgttctgtgaggggaaaaaagagaaagagagggagagagagagagagggggctggccggctgggggagtgccaggccagctgtggggtgtgtgtgtgcctgtgtgggggaactgctggggatggagagcgagatggcggacgcgcccgccgcggcgatcccccccgccgccgaaccgctcgcggcggtggcggaggaaggggaaggtgaagcggaagcggaggcgcccgccgaggcggcggtggggtccaccctcaccatggagcgcgtcgccgccgcgaagaagttcatcgagaaccactaccgttcgcagatgaagaccatccaggagcgcaaggagaggcgctttaaattggagagacagctagcttcttctcaagttcccaaggagcagcaaatcgatttaataaaagatcttgagaggaaggaaactgaatacatgcgacttaaaaggcacaaaatttgtgtggatgactttgagctgctcactattattgggagaggagcttttggagaggttcgattgtgtcgagagaagacctccggcaacatttatgcaatgaaaaaactcaagaagtctgatatggttgtcaggggccaagtggaacatgttagagccgaaagaaacttgttggcggaagttgctagtcactgcattgtgaagctttactattctttccaagacaccgagtatctttacctaattatggagtacctccctggtggtgatatcatgacccttctcatgagagaggataccttgactgaacatgtagcgcgattctacattgctgagacaattcttgctatccaatccatccataaacataactacatccacagagatattaagcctgataatttgcttctagataaaaatggtcacatgaagctgtcagattttgggctgtgcaagccaattgactgctcaaagctctcaacgttgaatgaagatgaacccatgggtgatgacaacatgagggaatcaatggatattgatagttctttgtccaatacagcaaatggtagaagatggagaagtcaacacgaacagcttcagcactggcagatgaacagaagaaaactggcattctcaactgtcgggacaccggattatattgctccagaggttctgctgaagaagggatatggaatggaatgtgattggtggtctctaggcgcgatcatgtatgagatgctagttgggtatccaccattttatgccgatgatccaataactacatgccgaaagattgtgcactggagaaaccatttgaagtttcctgaggatgcaaagttgtcaaatgaagcaagagatctcatttgccggttattatgtgatgttgaccacaggattggcagtgcaggggcagatcaaataaaggcacatccttggttccaaggagtcgcatgggacaaactttatgaaatggaagcagcatttaagcctcaagtaaatgatgaactggatacacagaatttcatgaaatttgaggaactggaaaatcctccagccaaaacaggctctgggccttcaagaaagatgatgctgaactccaaagatctgagctttgtggggtatacatacaaaaactttgatgcagtgaaagcaataaaaatttcagatctgcaaaggaattcatctctaacaaggccttccattggttcgatattcggtccatcaggcatggattctcccatggaaccaaacggaagggacacacacatgcacacagtttcatctggtgacccaatgattccctaaccttcagtgccgtctgtcctcagcaaatttccgaactaaatcagcgtgcaaacgccagggtgatgtggctccagctggacaacatgcttatttttagccaggtctctgctctctttatcgtgggcaagcggtttgtagaaatccaccaaagtttctagttgtaaaatagtatgccacagacttcaacaaaggtcccatgcattattggctcatcagacatgggggcagtttttttttggagaaattgcaccttgcggctggctgcccaggttggcagagcaaattgcggccttctcttgtggcagttcccggtctgcaggaaagggaaatacgacggtgttgttgcagcaggaattctcatggttagtgtcgttgttggtgtttgatatgtatcaggaattttcacatttgaagtagggtttctgttagcagagttgtagctattgacaagcaacatccttttacggagttgctttttttcgttgatgtatggaaaacgagacattgtagaaatcgaagttcgatctagccttgtatgctgcatatctgattcaaagtgtttctcagtatttttgtctaaaaattgcttaaatcaatgtgaaaatagaatttttgtgt

SEQ ID NO: 5211 - DNA, 1768 bp, Zea mays
aatggcaatctatctcgatttgcagtgaatatttttgccctccgggccagggtttggcagtagaaaagatgacctgaacaatgtatcaccacacatatgtaccaaaatatacctagaggcagcggcagcacacacaagtgtcaccgttgaggtatcaagctgaacatccatccatccttcaaaacaccggacagaacaagaaaaaaaatcgctacataaatggtggaaagaattgctattagcagctcaatgtgaaatcctcagctctaatgcaccacgccgcatatgatgttgtgcaggactacattcagatgaggagggaagcacatagcatcagcaatgcgatgaggatcgagacatcggttcgcattctgagggcggcatgcgaaggagatgcagccgtggtggtgttactgactggaggtagggctggttctgcaacgtcagcgtccgtcaagagcggcattggcgccgctgctggtggctgtgcatctggggccatggttaaaaggaggctacctggttgcggaggctgcataaatagtggtgcgctgtttcccatgctcgtgcaggagttcaatttgtatctgtgagcagtcccagggaaatcagtgatgatcccgtccaccttagcaccttgcacataagcattaatctgtgaagtggcgtctgcgaagaagtcattcggctgagatgcaaactcattcatgagcacatagacgtaaacttggaggcccgcagactgaagggacgtgacaagcttattggtctggtttgtcaaataataatgggtctgtggtaaaacagatgtggtgctaacagagacggcattagcaaacttcttaatgtctgcaagggatgaaggtgcggcatctctgacaccttcttcaatcatgtagacaaggctgtacttggtttcctgcttgaacttctttagcaccgagctgttggttgactgaatcataacattctgggcagtctgtttgctataaccagagtcatcaagtgctttgaccactgcgtctaccactccaaatccaagcttctctgccatgaatgcagcatgctcaacagttatcatgattcctgacaaatcctttccctttgcaaacgtcaaaaagtctgataatctcatgaaatttcctgcattcttgtttctgggatttctgtacagtttataggtgctcattgggttcgatatcatgggctgtaggttcttagaaatatcatcccaagtaaggttgaaggtgaagactccaggaccagccttcagatcgttgatggtagttacttgcgaagtaaatgatgattttccaacagtagtgacatccattaggtcaacagaactcatgcatatcagtatgccatctttggtcacttgaacaggacagtcaatgacatctgcaccatcagcaactgccttttcataagcttggtcggtgcagtctgggtagtcaccgctagcaccattatgagagataaccagaggtttagcatggtcgatcttgctgttgttcaggttactaaagcaaccaactgcctctgaaggagtaatcgggaaatcagtcaacacaccatcgacagagaaggcactgttccccggccggcctcgagggtcccctaatggatcaaagctgtagttatagctgatagtaaagtcatttgcaaaatcagcagcatagatttctagccccgctttgtgagcatcatcaacaactgaagtataaggcagtaggtaattatctggtgtaacccggccggcctcgag

SEQ ID NO: 5212 - DNA, 2142 bp, Zea mays
ccggccgggagatttgggttccggactgctttatctataacaactcgttgtggcgcctaaattattgtgttggtggtgaggtcactacaatgtatcatttggatcgccctatgtacctattgggatatcttgcgaaccaaagtcgagtttatcttattgacaaggagtttaatatcattgggtacacattacttctgagtttgattgagtacaagacccttgtgatgcgtggggatttggaacatgcaaatgaaattttatcatccataccaaaggcacaatacaatagtgttgctcattttttggaatctagaggtatgttggaagaggctcttgagatagccacggatgctgactacaagtttgacctagctgtgcagcttggaaaattagatgttgcaaaggctatcgtcatagaagcacagagtgaatctaaatggaagcagttgggtgaactcgccatgtccacaggcaagctagagatggcggaggaatgccttcttcaagcgaaggatttaagtggcttgttgctattgtactcatctcttggagatgctgaaggaattgaaaagcttgcttctttggcaaaagaacatggaaaaaacaatgttgctttcctctgccttttcatgcttggtaaagtggaagattgcatacagttgcttgtagacagtagccgtatacctgaagctgcactaatggcgcgatcgtatcttcctagcaaagtaccagaaatagtagcaatttggagaaacgacctcagtaaaattaatccaaaagctgcagagtctctggcagatccttctgaatatccaaatttatttgaagactggcaggttgctctaactgtagaaaaaagcgttgcttctcagagggatcattatcctcctgctgaccaatacttgaatcatgctgagaagtcaggcatgattcttgtggaagctttcaaaaggatgcaggtcattgagcatgaggaacctgaagatgcagctgaggaaaatggagaacctgatcaacaggcatcggaagagaaggaaatgcataacacagatgatgctgatgaacatgaagagacagtttcagtaaatgggaacgagggtgaggaacagcaggtgctaactgaacatgaataggggccgagggaagcacaacgcattggctgcaaatgttattttttcccgagggtaacaaatgtggcccccagttttaccctgaagcaccggaaactggtgatgcttgtggccattggaggccacctgatgcttgtccgatctttctgagtgaaccccaagcttgacatattgatgcttgctacacttttggtgtcgatatgcttcttctgccaacaacataggcaattctttcttctcggatcatctgcggacccgatttctatgcgctcgaaccaatgaactgggtggggactgtggagccattttgtgatgaatagttcgaataatcagtatagaggtacgttgtaaaatatgccagattaccatagccatcgaattctcctaggagatgacagtttttgttagccattcattgtaatgatgttacttgataaggaaggttacgtgtagtatatgattgcggttgcgggccgagggttttgcccatgttatacttatatatagtggtatcaatccatcggatcggaggctctcgtctactgatgcctaatcaatgccgatgactgcgagaattcaatgcctagatatgcagtgtaacagtgtctcgctgcacacctattcatcgtttcaaaccatggtccatggaatttattttgatgctggaatgctgcggcatgtccaactgacatatgtgtgctgtgccctcgcttggccgcggcgcctttttatgtgtttggatcacattcacgcgtacggagcacgtcgacgagtgaaccaacacaaagacaagagaaattaatttgtctcgtctattataattcttatattatcattaattgggtatatagataactaggctcccttcacttttggagttgttggcctcctcgtgaaaaattattacttgtccaggcgcgagatcgccatggacgccgcctacgggaaaggcagatggggcctggggagcgagagcgggggtcactggacgcaaccgcaccaagggtaccga

SEQ ID NO: 5213 - DNA, 1762 bp, Zea mays
agatctactagtgtcgaccgcgacggaaacttcccttccgtctcacggcaagtatcttccctcttcccctctgctcctgccaggctgccacacctccgccagcgctagggttttcattttcactcgctgttgctggtggttgttacccttcctctctctctcagccgtcaccctcggagccgcagtcgccgtagcagatcttctctctaatcctatcggtcaacagctgcttgctcgggacgggaaccggaggtggggttgcgatggcgctgcagtacgtggaggcgcagcggcagttgcgcccggacctctccgactggtacgcctccctcgccgacctctaccagcggaagctatggcaccagctcaccctcaagctcgaccaattcttacagctccaggtcgcacagaccggagacactatcattcagctctacaacaatttcattgtcgactttgagaccaagattaatctgctcaaacttgcccattttgcggtgataacttctcgccagtaccctgataaggatgctgcaattactttcttagagggggtgatcacaaagctgcgtgagacaagggagtcacggatcaatgaaccaattctctatgtgaagatgcaaattgcagctattaatcttgagaaaggaaacaaaaaagagtgcaagaatttgttggaagatgggaaaaccactctggatagtatgactgatgtcgatcccacagttcatgctagcttttactggatatcatctcaataccacaaggcctgccaagaatttgcagagttctataagaatgctcttctctatctggcctacacaactgtggagtctctatctgagtcattcaagctagacttggcttttgatctatctctagcagccttgctgggtgataacatttacaactttggggagttgttagctcacccgattatcaatagtcttattggaactaaggtggagtgggtttatcatatgttacaagcattcaacagcggcaaccttgccctctaccaagaactttgcagggttcacaatgctgctcttactgcacaaccagctttggtgcagaatgagcggaagctgcttgagaaaatcaatattctttgtctgatggagataatctttagtcggccatctgaagatagaactattccattaagtgttattgctgagcggactaagctttcaatcagtgacgtggaatgtcttcttatgaagagcctctcggttcatcttattgagggaataattgatgaagtggacagtacagttcacgtatcatgggtccagcctagagtgcttggaattccacaggttaaggctttgcgcgaccgcctggatgcctgggttggaaaggtgcataccacattgctttcagttgaggcggaaacacctgatcttgttgctgtgtaatttcacagctgttacacttccgcgagaggcttggtcagcaaggtcccatttgcaaaatgtgagatgctttgtgtgacacgtagtcattttctggataatgagatctgctgctgccctgagcgtttgtcttcctgcgcctactgatcaggacatgtaatttcttttttggtgccctcaggacatggatggttagaactgcacgcagtgtcacggagacgggaccaatggattgaaaatttcatactagtagggtgttactagtagaacacgatgcaggagaatcttgctggaaaaaaaaaaaaaaaagatgtttgcatggcgccctgcgataagacgtggat

SEQ ID NO: 5214 - DNA, 1746 bp, Zea mays
gatctggtcctcatgaagaatgggtgccattgcgacaaccccgcgtccggccgcctcagatacgtcttgcgcaccctgctaccctctcaaaattcaaaactaggaaacgactcagggaaacagcaggaagttgtttatgggttatcggagatcatgtagacgcttgggtcaacaatagctgttggcgagagggagttatttctcagaattatgagactgatgagacgaaatatgatgtacatttttcagttggaggtggtggtgagtccttagtagttgatgcttggagccttcgtccatcgcgtgtttggaaagatggtcaatgggtagagtggtcccgtgcaagagaaaggaaatccaaatctaataagggcgattcacctcctgagaaacgccaaagaatcgacttgcttcaaactggtggcaatctatctgttcttggcgaagtggggggttcttcgaaggacaataatataaacaatgcaaaaaacccggaggaattaaagccattgtctttgtctcagggggaaattgttttcaacattgggaaaagtgtagttgagaataaatctgattctcttgcattcagacgtcctggactacaaaaagaaggatcaaaggtcgtctatggtgttccaaaacatggaaagaagaagaagtttatggaagtaagcaaacattatgatgcaggccaatctgacaagatttctgagggcaattcatctaacagattcgtgaaacatctgatgccacaattgccaaggccacgtgaaaatgcttccaaagttgaccctattagaggaaggagagtaggtgaaacaaggtctagattacctaaacctacgaagtcccacaatgttggagctagcagtgttcctggaaaggattccttgcctatgcaaatgcatgttccaaattctggtgtttctgaaaggagttctagttttgcaggaagttcgacaagcacttccaacaatgagaagcccacttcagaaaataataatccggtgcttggtgtgggccttagaactgaagtttcttctggtcctgaactgcaaactgcatctactgttcctagttccaagccaaatgtatccactactaatcgagctaaaaggaaatatgttcccactgtcagtaacacaaacagaggtatactaaaaacctctgaaaagtcgagttctgattctgctgagccccgaaggactacttctgattctgctgaacctagacgatctaacaggcgaattcaaccaacttcaaggttactagagggcttgcaaagttccctcgtaatctcgaaagttcctggcgagaaggttcataggagcaattacaaaagtgcatcctcaagagggagaactcaagctcatgggtgagtgaaggcaccacatagctcatagctgcttttggtgggacagctctcgtgtacatagctgtagccgtccagtatggaaggaggatagggttggagtaggaagtctttattggagcgcaaggattcagatgtattataaactagcttaagtgcattgtgttaaccttttcttttacttgctcgaattatacttttccgtgttgtagaatacctggaaatatccttttagtatgtgtggatacaccgggaaagaaattgggtgccgtttaaattcatccgataatttaacgtgagtctgaacgtcaatttgactcgctactaaaatttgaaaaaaaaaaaaaaaaaaaaaaaaaaaaactcgagggggg

SEQ ID NO: 5215 - DNA, 2727 bp, Zea mays
cccacgcgtccgaaccgtgagtgatgatgatgttgtacttgaaactacagcaccaaggctgtacagcatcaatgatggccaattgaagctggaagaaacagctcttacaaaagccgtgcttgaaaataccagatgtttcttacttgactgtggggctgaaatatatgtatgggttggccgggtaacacaaatggaggatagaaaatctgccactaaagcagttgaggaatttcttattaatcaaaagcgtccaaagacaacgagggtaactcaagtgattcaaggttatgagagtcatgctttcaagtccaagtttgaatcatggccagtgggtaatgctactgggagccctggcgcagaggaagggcggggaaaagttgcagctttattgaagcaacaaggtgttgatctcaaaggagctgcaaaaagcaccaccccagtaaatgaggaagttcctcctttgcttgaaggcggtggaaagcttgaggtatggtgtgttgatggcaacgctaagactgctctgccaaaagaggatattggaaagttttacagtggagactgttatatcattctctatacgtatcattcgggcgacaagaaagaagaatactatctcagctactggattgggaaggatagcttggtggacgatcaagtgtcggcatctcaaataactaatacagtgtggaattcattgaaaggacggccagttctgggtcgtatataccaagggaaggagccaccacagtttgttgcacttttccagcccatgattatcttgaagggtggaattggatctggatacaagaagctcatagaagaaaagggtgcgacgggtgagacttatactactgaaggcatagctctaattcgagtatctgggacatctatccacaacaacaagactcttcaagtcgatacggtggcaacatctttaagctcaatggagtgtttcatactgcaatctggaaatgctatgtttacatggtttggcaattctagcacatatgagcaacagcagtgggcagcaaaagttgctgaatttttgaagcctggcgttgcagtgaagcactgcaaggaggggacagagagttcaggtttctggtttgctcttggaggaaaacagagttatacaaataaaaatgctcctcaggatattattactagagagcctcacttgtatgcattctcattcaagaacgggagactggaggtaactgagatcttcaacttttcccaagatgatttgttaactgaagacatgatgatacttgacacacatggtgaggttttcatttggattggtcagtgcgtggaatcaaaagagaaacagaaggcatttgatattggccagaaatacgtggagcatgcaaattctattgatgatctttctccatatgcaccactatataaagttatggaagggaatgagccatgcttcttcaagacatatttctcttgggataacacaaaatctttggttcatggaaattccttccagaagaaactctcactgctttttggattgcgttctgagggtgcatctaggagctctggtaatggtggaccaactcaaagggcatctgcattagcagctctatcatctgcattcaatccatcgtctcaacaaaggctctctaatgagaggcctaaaagcacaggcgatggacccactcaacgcgcctcagcactggctgccctatctaatgcattcaattcatccttaaaacccaaaacaccacctccatctcgctcaggtcaaggttcccaaagagcagctgccgtagctgcactatcctctgtgctgactgctgagcaatctggatcttcagaaaatctacgagccaaagctagcagcacaggagataagactgatgtcgataggcctgtcataactccagctggaccatctggtccatcttctcctcagtctgaagctggggagtccaatgtgtttcgccaggaaaaagatgctgcagtagatggggcaccatctgacactgatggagcagtggctgagacccgagaggaagaaacgacagagaatgttggtgaagcgacatttagctatgaccgcttgatatctaaatctaccgatccagtccgtgggatagattacaaacgcagagaggcatacttatctgatagtgagttccaaagtgtttttggcatgaccaaggatgcattctaccgacagccaaattggaagcaagaactacagaagcgaaaagcagatctcttctaaagagaacacgccttgtctcaagcgcctgctagaaaatgcgaccctctcgtcgtgaatggtcggtcccatgagagtaagtctcaatatattgctggttatttctgaggacgggctactggtggctttgctcggttgttttttttttgcaaccaattttataggccgattcttttatttgtacatggcctgggttgtgctgcttgcgaggtcctaaaatgctcatagctttgtgttgtgactgtccatatgtgtatatcgttttttttcatcagtttgttacgtatgggcatatcctggtaggttgtcaattgtattgtcattcagatgtattgcacacgaaatacttgtgctgtctgtttgttgttgatggttggcagttgttttgtttgggatttgaaacacttgattggatttctcaaaaaaaaaaaaaaaaaaaaaaaaaacgccaaaaaaaaaaaaactcgaggaagggccgcggtacc

SEQ ID NO: 5216 - DNA, 1729 bp, Zea mays
aattcggcacgccccccccccccccccccggtccacaccgtccccgtcctcccactcccccctcgcaaccatttcaaatcgctctctcgacccaactgtactcgccgtcgtcaattcatcatccatccccatccccccatcgactcccagatctctatccccctctccctgtcctcactctctcgagcgcgttgtggcggatgtcctcgtcggcgcgtttcgatctccgggcctcgtcgcatcagttgcagccgccgccgtcgcacgccagcatgagcagcgacgggggcgcgttcgcaaacgcggagaacctggagcactgcgcccggtacctgaaccagacgctcgtcaccttcggattcccggcatctctcgacctcttcgccaccgatccggtctcgattgcaagaacttgtaactgcatctatgcgctgctgcagcagcgacagagggacattgagttcagggagtctacaaatgaccagcggcagcggatgcaatctgatatctcacggctggaagctaagatagagagaatggatgctcaattagcagcgaaagatcgagagctagccactcttactcgaacggaggccaaaaacactgctgctctgaagtctcagattgataagctgcaacaagaacgtgatgaatttcagaaaatggttataggaaatcagcaagtacgcacccagcaaattcatgaaatgaagaagaaagagaaagaatacataaagttgcaggaaaagctaaatcaggtattgatggagaagaaaaaggaatcatcccgttctggaatggagataatgaacttgttgcagaaagaaggacgacaacgcggaacatggaatggaaaaaagaacgacaatgattattacaaaatgattgttgatgcatatgaagtaaagaaacaagagctgatgcaagagaatgcagatttacgggcactgttacgttcaatgcagatggacatgcgtgactttctcaatgccccgaatgggtcatcacaatctactgttactgataatggaagacaggagtcagggtctcctcagtctccgcttggtggcaagacggatgtttttgacttgccctttcatatggccagagatcagatagaagagagtttgcgcacaaaaatgacttcaatcaaggcacgaatgacacaacttcaagatgctcagaaaggtgcagaagtgacttctgaggcaactgaccgggagcttgagcttgaagctcaactggttgaagcaagaagcatcatccaagagcaggcctgcatcatgtccaagcacttcaagtctgataagccaagtggcaggaggcatagcggtctggatggcgagcgtgaggcatctgccgaggtgtaaaagcatgtctgtagcaaggatatatctgttctgcaggacctcctgattttagtaagtaccgaggtagtatgttgcaggatataacatggtcctgtgctgttgtagcccgagtttaggtgctgtctatgcagtatgatgtgcaggagcatatcctccagcacatggctaacccgatcacatctaagtcacatgtagcgtaactgtaatcatattcatactatatgaagaatgtcagtgtagcaacccttgaaaaaaatggacctttcggaccttacatctagaaaaaaaaaaaacaagataaaaaaaaaaaaaaaagcggcccagcggtgacagcacgttgtgacccttgttccctgctg

SEQ ID NO: 5217 - DNA, 1450 bp, Zea mays
atgttttgtgttcgttccacgtgtctgtgcacaggcctagctctggaaccgctctcgggagccctggcggccggcaacgccgtggtggtgaagccgtcggagctcgcgccggccacctcggcgttcctcgcggccaacatacccaagtacctggactccaaggccgtgaaggtggtggagggcgggccggaggtgggggagaagctcatggagcaccgatgggacaaggttctcttcactggtaatgaactacgtacgtaatgcatgagcgtgtatctgcgttaccacctggtgtctctctatagggcgattgggttctctcgaggccggccgaggcagccgcgttgggcgccttatcatggcccaggccgccaagcacctcaccccggtggcgctggagctcggctccaagtgcccctgcatcgtcgactggcttgacagcgacagggacagccaggtagctgtgaatcgcatcatcggagcgaaatggtccacctgttccggccaagcctgcatcgccatcgactacctgctggtggaggaggagtttgctccgattctgatcgagatgctcaagtcgacgctggagaggttcttcaccaagccagagtacatggcgcgcatcctgaacgagaagcagttccagaggctgagcggcttcctggccgaccgcagggtggcgtcttccgtggtccacggcggccacttcaaccccaagacgctgagcatggagcccacgcttctgctcaaccctccgctcgactccgacatcatgacggaggagatattcggcccgctgctcccgatcatcacggtgaagaagatcgaagacagcatcaagttcctcaggtccaagcccaagccgctggcgatctacgccttcaccaggaacgagaagctgaagcaacgcatcatagacgagacgtcgtcggggagcatcacgttcaacgacgccatcgtgcagtatggcctggacagcatcccgttcggtggcgtggggcacagcgggttcggccagtaccacggcaagtactcgtttgacatgttcagccacaagaaggcggtgctcaagaggagcttcctcgtcgagttcatgttccgctacccgccgtgggacgagaccaagatcggaatgctcaggcgcgtctaccgcttcgaatacgtctcgctcttcctcgcgctcatcggcctcaggagatgaagcagacggcggagagtgcgtgaacaatcgagccaacagaatttgcacccacacccaacacacagttgctagtggtcaattgtcgttcatactgatcgatgaatatgtaattgtcccttctgtacaccaaaacgtctgtagtgtcgtttactcgttttatacgtgtctgtctatttatcgcaccaaaagatatttaataataatggattattatctttctagtaaaaaaaaaaaaattaaaaaaaaaaa

SEQ ID NO: 5218 - DNA, 1477 bp, Zea mays
gcacgagaccattacctagaacatcctaatcgaaaagacgcaccgcacaccctagcataggaggcaaagaagtacagagggaggaggcgggcagcagatacgcggcgtgacagacacccagggccaggaagggtgctgtttatccatgctgctccggctgaagatcgtcgtcggcgtccactcggtggtgctcccggttcctgttccaggcggctatggccatggcgcctgctacgcggcagtagagccctgctggcgccgcagccggaggccagcgctagcggcggcgggtggcctcgtcgcgaggcggccgaggcagagcgccacggtggtgatggcgctgaaggaggagccggagggcagcagccgccgcggcttcgccggcggcggtccgagctgggaccccgggctggagatccaagtccccttcgagcaaagaccggtgaacgagtactctgctctcaaggatagcgccctctactcgtgggcggagctgagcccagggtccttcttcctccgcctcggcggcctgtgcctcgtgaccttcactgtgctcgcggctccaattgccgccgcaagcttcaatccaggaaaggatccactcaagttcgtgctagcagctgggatcgggacgctgcttctggtgtcactggcggttctcagaatatacctggggtggagctacgttggtgatcgcctgctgtcagcggtggtaccgtacgaagaaaccggatggtacgacggccagatgtgggtgaagccaccagaggtgttggcccgtgacaggctcctgggatcttacaaggtgaagccggtggtcaacctgctgaagcagacgctggtgggcaccggcgcgctgctcgtgggcgccgtgtcgctcttcgcgttcgccgcgccggtcgaggacttcctccacgccctgagccagcctccctcctccgccaccgcctcgtccaagccgagcttgaggaaggaggagctgctgcggctaccagtcgaggtgatgcaggacgacgacctcgctgcggccgcggccgaggccgccgacggccggcccgtctactgcagggaccgctactaccgggccctcgccggcggtcagtactgcaggtgggacgacctgctcaactgataaatacctagagcagtattgctgtggtacgacgcggcaggacaggacgtattttttttgtcagatgggaaatttcggactgaactgctagaaattgagttcttaatggcacacaagcataaggaacagcaagaaaaagcaacacagaatcagagaaaaaacaagagtttatatattcacttttctctctttgtttctggagttacatctggtctttccgtttcttgagttacctctgatctttttgtttcttgagttaaaaaaaaaaaaaaaaaccttttatttacagcaaaggatgcaagggttaatacacattacagtgtgtacttttcagtttctcccctc

SEQ ID NO: 5219 - DNA, 2021 bp, Zea mays
cgcaattaaccctcactaaagggaacaaaagctggagctccaccgcggtggcggccgctctagaactagtggatcccccgggctgcaggaattcgcgcgtccccggtcccctggacggccaccgccacgcagcactgtccgtccgcttctctctccccatctccatctgcaatcctcgctcgcccacgctcggcagccatggcgtcgtcgcgcaccggagccggagccggagccggagcggcggccgtgtggtggtcttcccgttcccgttccagggccacttcaacccggtgatgcggctggcccgcgcgctgcacgcccggggcctcgcgattaccgtcttccacagcggcgccctggacccggccgactaccccgccgactaccgcttcgtgcccgtgaccgtggaggcggacccgaagctgctggcgtccgaggacatcgccgccatcgtcaccacgctgaacgccagctgcgacgcccccttcagggcccgcctctcggcgctgctggccgccgaggggagggacagcgtccggtgcgtcttcaccgacgtcagctggaacgccgtgctgacggcgtccagcgacctcggcgtgcccgcgctcggcatgatgacggccagcgccgcctcgttacgcgactacatggcgtaccgcaccttgatcgacaagggctacctgccggtgaaagaggagcgcaaggaggatctccgtactccgagctacccctcgtacgtcggcgaggttattagcagagggagactagattagatttgcttatcatcacatacctgcagaggagcgcaaggaggatcccgtacccgagctacccccgtacctcgtcaaagacctgctccgggtcgacacgtccgacctggaggagttcgccgaactgctggcccgcaccgtcacagcggcgcggcgcgcctcggggctcatcttcaacaccttcccgctgatcgagacagacacgctggccgagatccacaaggccttgtcggtgccggtgttcgccgtcgccccgctcaacaagctggtgccgacggccacggccagcctgcacggggtggtgcaggcggaccggggctgcctgcagtggctggacacgcagcagccgggctccgtgctgtacgtcagcttcgggagcatggccgccatggacccgcacgagttcgtggagctcgcgtgggggctcgccgacagcaagcgccccttcgtgtgggtggtcaggcccaatctcatccgcggcttcgagtccggcgcgctgcccgacggggtggaggacgaggtgcgcggccgcggcatcgtcgtcacctgggcgccgcaggaggaggtgctcgcgcacccggccgtcggcggcttcctcacccacaacggctggaactccaccgtcgaggccatctcggagggcgtgcccatggtctgctgcccgcggcacggggaccagttcggcaacatgaggtacgtgtgcgacgtgtggaaggtgggcacggagctcgtgggggaacagctggagagaggccaggtcaaggccgccatcgacaggctctttggcaccaaggaaggggaggagatcaaggagaggatgaaggaattcaagatcgctgcggccaaaggcatcggcatcggcgtcgacgtcgacgaaactgcgtcgccccgcacggatttaaccgatttggttgatctcataaaatccttctgagctcatgacgatcgatctgttgggtgatgcctactctgtccatcgtgctcgacttgtcttcctactactgtaccactgtctgtgctcacttccacgttcctgacggtgttgtgttctagtgtatcattgtgcgatcagttccatgttcttggccatgttttagaataaaacagaaaacttgtgttcttggtgtaccactgtgctcactttcatgttcttgacggcgagttggaataaaacaagacttgtgtcatggtgtaccattgccatcattttcatgttaatataaagatttgacgctaaaaaaaaaaaaaaaa

SEQ ID NO: 5220 - DNA, 1322 bp, Zea mays
ggccgggccggggcacgagaccattacctagaacatcctaatcgaaaaacccgccgcagtccacgcgcccgcaccgcaccgcgcgccgcgctcgctgccgtgcccgtgtccccttcctttcccgtttccccctccctctctctttccccacgcccgacgcccccaccactctctcgatccaaagccagatcggcacgacgagcagagggccccccggagcggcgcggagcaatggcggcgggataccgggcggaggacgactacgactacctcttcaaggtggtactgatcggcgactccggcgtcggcaagtccaatctgctctcacgcttcacgcgcaacgagttcagccttgagtccaagtccaccatcggcgtcgagttcgccacccgctctctccaggtcgacggcaaggttgtcaaggcccagatttgggacactgctggccaggaacgatatcgtgctattactagtgcgtattatcgaggtgctgttggggcgttgcttgtatatgacgtcactcgtcactcaacctttgagaacgttgagcgttggctgaaggagttgagggaccacacagatcccaatatagttgttatgctggttggcaacaaatctgatctccgccatcttgtagcagttcaaactgatgaaggaaaagcattcgcagagagggagtcattgtatttcatggagacctctgcactcgagtcgactaacgttgaaaatgcattcgcagaggtcttaactcagatctaccgtattgtgagcaagagagcagttgaagctggcgaagatgcagcatctgggcctggcaagggcgagaagattaacataaaggatgatgtttcggcggtgaagaagggtggctgctgctctagctgacctgccctgctgtattttttttggagctgtggtgatgtagcttatggtacggcatttccagcgaccgagaactggtagtggcattagcagcttctatgttacctagagagtttattgtcaaactgggggaaaaaaactgaaggttagatcggtgtagatctttctggtactgtattgtgtatccggcaataggcatggtattgttttttttggctgtgaatccactggtaccatgtttaaacttatgaattgttcaaaatagaaaggtgcttcatgcttgccaaataaaaaaaaaaaaaaaaaaaaaagaaaacaagagaaaatgaaaaaagggcggccgcgattctgtggttaggatgtggaaaatggaggaagggttattgattgatacatcccgtgcacttggaggcaccatccgggcgattgcagctgactcg

SEQ ID NO: 5221 - DNA, 3845 bp, Zea mays
  misc_feature (6)..(6): n is a, c, g, or t
aatgangatatgcgatatagccggtggcggtggtgttgccatcccgctcgcggcgtgcagtcagtcagtcacagactccagcgagcgagggaccaaaaccctagctgaaccctcccggcccgcgcagcagctgcgtccatggaggtggacccctcgccgtcgtcgcgctcgcccaggccgccgcctccgccgctggcggcgatgccgagctacttcgacccggagtcgtccggccgtcgggaggagtaccgccgctacaggaagaggttgtcttcttcaaatgtctctcctctgctgggaagatcactctccaagacctctggaccaaggctgttatatgatggagaaagcatcccaagacagcctaatgccggtttactccttgaagacataaagcaggaagctgccgattattccaacgtagaaagcttggatggattgagactgttcggttcgccgaaaaggacatctctcgatggcggttctgcatcaggcgcagcttacagttcgggcaggcaagcagtgaggcagacgctgaagccagtcaaactggaggacgatatgtatgtgccgcatgaaggagaaacgccttctacaatgtttgcaactctccttgattctgggatccaaggtttgatgcacttccctgatgtaattcaacaatttgagaggacatgtcgaaatgcttcggagtcaatcagatctgctgcaactggaaagcttcgtgtggtggaagagaaacttatgcagcaaaatgctcaacttttactggacgaagctgcttcctggtcacttctttggcacatatatggcaaagaacatgaggagctttctggagagctgttggtgccgccaattacatctcatcaggaggcttgccgctttgttgcagcagacattacagcacaactgtgtctgcggatcatactttggcttgaaggtcttgcttctgaagctcttgatttggagaagaaggtgagaggcccgccggttggttcgtacctaccaagttctggtgtttggcaccgtacacagaggtacctaaaaaggaacaatgctgattctactatagtgaagcatgtggattttgatgctccaactcgtgaaggggcccaacttcttcctgatgacaagaagcaagatgaattgcttctagaagatatatggactcttttaagagcaggaagattagaagaggcatctgacttgtgccgttctgctggccaggcatggagagttgccactctttgtccttttggcggcataaatatgttcccttccctgaatgcattgcacaaaaatggaaagtacagaacactacaagccatggaattagaaagtggtgttgggcggcagtggcgtctttggaaatgggcatcatattgtgcttcagagaaaatcgctgagcaagatggaggccgttatgagatggctgtatatgctttacaatgcagtaacttaaagcgtgtcttgccaatctgtactgactgggagtcagcttgttgggcaatggcaagatcctggctagatgttcaagtggatctagaattatctcagtaccaaacaagtagaccagaaaagcaacttgatgacgacatgaatggagcccaaagttcagttggtccagaaagttggccataccatgttcttgatcagcaacctcatgatttaactgctcttctgcagaaactccactcaagtgaccttgttcatgaaactgtctctcgagcatgccgagagcagcatcgacaagttcagatgaatctgatgagtggaaatatatctcatcttcttgaccttctatggtcatggttatcacctgctgaagagaaccataataatactgcaaggccccttgatgaccctgagatgatacggttcggggcacatattgttcttgtgctgaggcaccttttcagtgatgggatggatgatgagttagatgaaaaactggttactgtcggtgatctcatcatcaacatgtacgtgaggtatttgttctcagaggatcaagaggagttggttggaatatatgcctcacagcttcaacatgacctttgcattactttgtttgtagaaatgatggaactaaggttaaatagcagtttgcatactatgtacaagctcttcctttctgctgtggagtatctgccattctcatctgataatgtatccaaggcttgttttgaagagatcatcgagagggtgctttcaagatctcggcaaacaaaacccactaagtatgatggggatttctctgatgttgcgcatcaacatcacctgcaatcacttcaaaaggctatggttattcagtggctttgcttcacaccaccatcctcgattccagactttcaaatgatcagtgggaagcttctgatacgggcattgacacatagcaatacactgttcagggagttttctctgatatcaatgaggagagtccctgagctaccagcagggccacacaagttgcttgccattttagctgaaccgttaaagcaaaaagaaaatttaatttcacgggaagatccggaggtatctgataacttgccggagtttgaagattggcatgaatattactcccttgacgcgacttaccgcagttggcttaaaattgagatgatgaatgccgctgtttctcctgagatgctttcggcagaggaaaagggtcaagctgttgctgcagctaaagaaacactgaacttggcatgttcgttactacgcagggatggaagaccatggctgtatgctgtcgagagcagtccatttgaatcccccgatgttattttccttgagctgcatgcttctgcaatgctctgcctaccttctggagaatgtatgttaccagatgcaacatcatgcacagctttgacaagtgcactatattcaactgtcagtgaagatgatgtgctgcatcgcctgttgaaggtggatgtccaggtctcttctagagacccctgctgtattgaagtcgctcttcgctgcttagcagcagaaggtgatggatatgggcttcatgaagccaacgatggaggtcttcttgctgcagtcatggctgctggctttaaaggtgaactcagtcggttccaacctggagtttcgatggcaatttcacggcttgatgcttggtattctgaccggagtggttccgtggagagcaccgctgcttacataattcgagggctgtgtcggaggtgctgccttcctgaaacaattctaagatctatgcaggcatgtatcgcactctccgcggctggtgatgatctagattactctctagataaatgtgacgaacttgttgagttagttggttcagccgagtctggaatgatgcatttgttcagccagcagcagttgcaggagttcctgattttcgagagggaatatctcatatgtacaatggagcttgaggaggaccggttgccttgtgatggctaagctttttccccacttgctgactaatccatgagacatgaccggcatgtgcattttgcggcgccgtgacccaagaacctgctgtgatgtatcgctacaccatttcaaagcggaaagatggaatttagtgcgtaacgtggttctgcccgtttgtgcacgagaattggcccgttttggaaagtcaatataagattattcaagtcgaaatccaagatttttgttcatgataaaaacaatgttcggcgcgaaaaaaaaaaaaaaaaaaaaaaaaaaaaaaaaaaaaaaaaaaaaaaagggcggtcggcggcctccggaaatttttgaccgggcactcgctaactaattacctcctggacccttaaaaaattccccctatagggtcttggaagtaaaccttgttgcttttttgg

SEQ ID NO: 5222 - DNA, 4100 bp, Zea mays
ctatatgagccccctgcagatgatattttcttgacaataagctgttgtcacgcaaaccattctccgttctgtttctcttgtttctggttgcttcgtgtaacatgtgaatccaccctactctctgacagtcatatgtgcccatgcataacgctagctgattcaatgaatgatgacaacacattattttcagatccttaaaaagcatgtatgtgtcctagtagttgcgtttacagaaaagaatgtcaaattgtgtatgtttcaatcgtttgagctacggggatgatcagagaattacatttccttcttaaatcatagccttttattttactgaaatatgtgttgtgtgttctaattggttcatacataattttctgcagaaagatccacttttggtgaaggtgaataagctgacatccacgaagacgcaacttccctactcatattactctcttcctttctgtaaaccaaacacgatagttgacagtgcagagaatcttggagaagttctgcgtggtgatcgcattgagaactctccttatgtggtcagtactagattactgcttgtcacatattcagcattgtaatttgtaatgtaccaaatcactgagtcgtcatgcactttgccgttttacgtttgtgttgtagtttgagatgggggaacccaagatgtgccagattatctgcaaagcaaaaattgatgataaacaggcaaaggagctcaaggaaaaaatagaggatgagtatcgggtgaacatgtacggattttatatgtggcactgtaattttgattgcatgaaaaatgctgcagttacataacgtattttcttcacaggattcttgacaatctcccactagttgttcctcttgcaaggcaggataggggtgctactgtttaccaggctggatatcatgttggtgtcaagggccaatacgctggtgtaagtttgtgtgctcagctggtgttttacttttaacagtgtgtaggtctccttttttcttgagagggtggagttatcttattacaaaatatatgttacagaacaatgataagaagtcctttatccacaatcacttggcatttttagtaaaataccacaaggatgaaactacagatctctctagaattgttggatttgaggtcaaaccattcaggttagttttagttatgcttgccctattttgttagtatgatgcctttcacgctgacactatcttgtttactaacttatactttttttgttaaatttctcatgccagtatcaatcaccagtttgaagggccgtggaatgataaaaacactcgtttaatcacatgtgatcctcatgccagcaagcttctggtaaactcagatactcctcaggaggttgaagccgggaaggaaatcatatttacctatgatgtaggcttcgaggtgatgtttctcacatctgcttctctttttgtgccctaacatctttccttaatactccctctgattcttagtgtagaccatttaggatggtgacacggtcttaaatgtgacacttgacctgcaatttttctaaaagtatgttttctatatatattatagaagtattttccatgttgaatctaccacatgaactgcgttgtcaagttacttaacatacattttaaaatttgagtttgttttaatgttttctgatttgcttggtattgctctgcaggagagtgatatcaagtgggcttctcgctgggacacctacttgttaatgatagatgatcaaattcactggttttctattgtgaactctctcatgatcgtactcttcttatctgggatggtggcaatgattatgctccgcaccctgtatagagatatctctaggtacaatcagcttgaaactgaagaagaaacccaagaggagacaggatggaagcttgttcatggagacgtattccgccctcctgcaaactctgacttactctgtgtctgtgttgggactggtgttcagttcttcggtatgctgctagtaaccatgatctttgctgttctgggtttcctttcaccatcaaaccggggaggactgatgactgccatgctgctcacttgggtcttgatggggttgtttgctggatatgcttcttcacgcctgtataagatgttgaaaggatcagaatggaagagcatcaccctgaggaccgccttcctgtttcctgggattgctttcggtattttcttcgtccttaatgctctaatatgggggggagaagtcgtctggcgctgttcctttcaccacaatgtttgccttggtcctcctctggtttggtatctcggttcctcttgtatttgtcgggagctatctgggcttcaagcaacctgccattgaggctccggtgaagacgaacaagatcccgagacaggtccccgagcaggcttggtacatgaaccctgccttcaccattctgattggtggcatacttccgttcggagcagtcttcatcgagctcttcttcatcctgacgtcgatctggcttcatcagttctactacatctttggcttcctgttcctggtgttcattatcctcatcgtcacctgtgcggagatcacaatcgtgctgtgctatttccaactgtgcagtgaggactacctgtggtggtggaggtcctttctgacctcaggatcatcagcaatctacctcttcctgtatgccgggttctacttcttcactaagctgcagatcactaaggtggtgtcgggcatgctgtactttggctacatgcttcttgcctcgttcgctttctgtgtgctcaccggtacgatcggcttctacgcctgcttctgcttcacaagattgatttattcttctgtgaagatcgactaggcatgttccatgggcctgcagcgagtatgcccattgcgtttttttcatgaattttcagtgcagctgtacttttggtgttagcttataaaccatttatgctcactgtggttcagagttgtacaaggataggacactactgctagctttatatggggtaattttaacttgtgctgttgagaactgctgcatacgttcaatccatagtctcgttatcgtctgccacccctttcctgcttcagctgcatgatgatgtccatacgtgcttggctttcatcaagaaaatgttagcttcatctccccagtaatatttcggggactccggcggcactcatcctcaccaggcgaataccgtacgtgatcagtttatgcaaaatattcgaagcgtatgaatgttagtagttaggtgattaatgatgggtatccattttacgaatttcggatgaaatgttcggatcgatatgtatcttgcttcggcttcgttcagatcagctaattataattttttataagctataatagtggaagtgagctagccaattgcttttttataagctagatgatcgaatacttcaaattagaccgcagatagtgtaaactaggctgtttgaatcagctataaattgttttgacagctagcaacctatatcaggggctagtttagaaacttcattttctcaagagattcttattttcctaaaggaaaataaactaatttctcttgtgaaaaggaaaattccattaaaaatagggttcccaaactagccctaataaatcaaaacaagactttagatattttatttttatgaaataatctccaggttgagtctttaagtcaaatccaaaataacctcttgtatcttttgagggcttgtgtttagaagtgaagtattttttagtttctaaagaatatcatggttttagtaaaaaccatagtattttatgtcataagggcatgtttgataatgtagttttaaaagtctatagttttgaaatccggtagtttataattgtacatgacccaaatattgcaatattgccttaccatagtaaaaccgcagtataacttacaatcgagacgtgttttgtttcattagaaattacataagaaacctgaggtcccgagtggacttttcaaatctcctaaaattccacagttttgagtacactatgatatttaaaattgtgttttacttgtaccaaccgtcggctttttaaaaaccaaaaccgcagtattatctaataacaaagtattgtct

SEQ ID NO: 5223 - DNA, 1712 bp, Zea mays
cattgggtacctcgagccggccggccggagatttggattgtcacgtaattcgtttccctgtcctccccctctcgctgagctgagcccacctactccctcccaccacttgcattcacacactcgattccgctgctctctccctcttcctctcccccgcggcggagccataaaccctaggcctcgccgtcgtcggaggcgccgccgcgatgtcgcactttggaaggacgggtccgccggacatccgcgacaccttctcgctgctcgtcctcaacatcagcttccgaaccacggccgacgaccttttcccgctcttcgagcgctgcggcaaggtcgtcgacgtcttcatcccgagggaccgcaggaccggggactcgaggggttttgcgttcgtgcggtacaagtacgccgacgaggcgcagaaggctatagatcggctcgatggccgtaatgtggatgggaggaacatcatggtgcagtttgcaaagtacggccccaatgctgtgccaatccacaaaggaagggtcaaagagggggttgagaaatcaagagacaggtcaaggagccgtagtccaaggccaaggcacagagacagagatgatagaaggcgaagtcgcagcaggagcaggagcagagaaaggcatgtccatgatagagatagggactatcgtcgtcggagcagaagtagaagccgaagtatgagttcaagccctgaccacaaaagtcatcgtagagcaagagatgatgttaagcgcaagagcagaagcaagagtagaagcaggagcaggagtagaagccgctcataccacagttcttcacctgcccggcgcagtgctagccctcccaagagcccaccgccacagaggagccccactcctgaaaagcatgccaatggaaaagattcacctctgtcacgcagtgtatctccatcaccgaagcgtgcaagctcccgcagcccaggcagcgatagcaaggaataaagcttgttgatctggtgatgcttaaagagcagtcttcccatgggattgcagaacgttgagaaggctgtttgaacatgatggcagtagcaatctgcaatcaaccgctatccaaggttgctagttgttcttttaatgacttctagaattgtgttttccagttgtcaaaatatgctgttggtttgtatttcgacctctattgtcttttaatacccttgtactgcatcatctactttatgtgcatccgtttcttgactccatattaatttgttaaaacatttgtgcattttctagttaaaaaaaaaaaaaaaaaattgctgtttaccgggagaatggtattgctcgggaccgactatggtggatgatgtcttgctgttagtctttgtcattggtgttgatatggggatgacacagctgatgatgtgacggtgctgatattgtatcgatattgatgctgatgctgcttacagtgaccatcttgatgcagtctatatttttgttcaagaggttctgaatcaaatcatgaaattccagatggatctcatgattggtaagaaaacttgtacaataatgccttacatgctatgttggttcttacccctaccctactttggcaaatgctttgcatcagttctagttggaacaaggtgcagactggcagagatgctgaggggtgtgtgtactcatagtaacaatggtactcgtcgtcgtcgtaatatggctaataatctctacggg

SEQ ID NO: 5224 - DNA, 2152 bp, Zea mays
ccggccgggaacgggccaatcaccgcgcgcagaactccaagtccgcgcacccattgggtccctcgaggccggccgggaaaccccccctagtttcttttcccccggttttttccgtcctctcctcactcgtgtccgatggctcgcccccgccgcctcctctgacgacggtctgactgacccccgcctccccggagagcggctccgctgtctcgccggatatggcgccgcctcgtccccctcctaacccggcgggggagcagcagccgcagctccacggggtggtcatcatcacgctccctcccgcggaccagccctccaagggcaagaccgtcaccgccttcgcctacaccaacgaccccccgccccctcgctcgcccccggatccggttatggggtacccggcggcgacggaggctaggcggcggccgaggcgggcgctctcgacgcggcgggtggcgacggcggcgctcgtgctgggcgcgctcgcggtcgccgcctactattgcttctactcggacgtggccgtgcagttcctggggatggagcaggaggaggagcagaggaacgagaccaggtctttcctgctgccgctctaccccaaggcgcgtcagggccgcgcactgcgcgagttcggggacgtcaagctcgccgccaggagggtcgacgacggcggaagaaaggctaggaacaggatggaggtcgcgaaggcggccacggcgaggaccaattccacggcgttgctcccgatcaagggcaatgtcttccccgatggccagtattacacatctatctttattggcaaccctccaagaccatactttcttgatgttgatactggaagcgacttgacgtggatccagtgtgatgcaccatgtacaaactgcgcaaagggaccacatcctctatataagccagcaaaagaaaagattgtccctcctagagacttgttgtgccaagaattgcaaggcaaccagaactactgcgaaacctgcaagcagtgtgactatgaaattgaatacgcagaccaaagctcctctatgggtgtccttgcaagggatgatatgcatatgatcgcaaccaatggtggaagggaaaaattagattttgtctttggtgcggcgataagctttcccagtcagctggctagtcacgggattattgccaacgtttttggccattgtatcactagagagcaaggtggtggaggatatatgtttctgggagatgattatgtacctagatggggagtaacatggacttctattcgaagtggtccagataacttatatcacacacaagcccaccatgtaaaatatggggatcagcaactccggaggcctgaacaggcaggaagcactgttcaagtaatttttgacagtggaagctcctatacgtacctcccaaatgaaatatatgaaaaccttgttgcagcaatcaaatatgcgtctccgggctttgtccaagacacttcagatcggacattacctttatgctggaaagctgatttccctgtgaggtatctggaagatgtcaagcagttcttcgagcccttgaaccttcacttcgggaagaaatggcttttcatgtctaaaacattcactatttctcctgaggattacttgattattagtgataaaggaaatgtctgtcttgggcttctcaacggaacggagattaatcatgggtcaactatcatagtaggagatgtttctctgcgcggcaagttggttgtgtacgacaatcaccggaagcagattggatgggcagattcagactgcaccaaacctcaatcacaaaagggctttcctttcttcctctgacgaagcatcactctctacataatacatgtgtaaagcgtaaatagtgaacgccattgtattgtagaatacattattaagtggagactgcctttgtgtatgggtatatcgttccattggaactgtcagaaatcctccactgtgttgtacccgtctgtaatgtgtatactatgttgtttacttgtatgatgtatgtacactatctcctctacatggagttgtcccctacacatggattttttgtagattagttacattatgaacattttcgacagaagttgggtactttacacaaaaaaaaaaaaaaatgaaaaaccgtaaaaatctgttttatc

SEQ ID NO: 5225 - DNA, 2611 bp, Zea mays
  misc_feature (2512)..(2512): n is a, c, g, or t
agctcgaattccgttgctgtcggcggccattggaggcttaaaatcttctgttgatatgctggtgacctacatgaaggagtacccaatgtgtcctcagattcttctgatctcagctcggttagacagaaagcatggtacatgtccaggtctgaaaagctttgatgagttgatcttgaattggcctaaagaggcacaaggaattcaatatatgtggaatcaatatgttgaacatgctctggccactgatgccgagttagctgagaaggtactgacttgctggtttgaagaacatggaaaggactgtgatatccaaagcaatgctgctatttgtatagaactgagcagtgaagaacctggaacatcatcacttgtttcacctcaggcagttggttctggtccatctatatcagaagatctcgtctttcggttactaaacctctcactgtataagatactggagaacaacctacaggaagcacaaatggctgcgagtaaagcattgaaattggctcatggggagtggtacgagcactgtataagagaacatgctgcaattcatgcactggagctggagaaatcatcatcttcgacagatgctcaaactcgggctacattcagtttaatcattggctaccttgctgatcattgcaacttgcccacgagggagctgctgtcacgaaggttttgccagaatattaagaagcataggcttaggcagcttatagatgatactattggttctgttcctgcagattcttctctgataaactctgtccttgaagtgtgctttggcccatccctccttccaaaaagcattagcgatgtgaagtacctggttgattttgttgaaacagtcatggaggctcttcctgcaaactatcgcctgggcttggctgttggtggattcgtagctaagcacttcacaggttatggcgcagcctccactgggaccaggttctgggcaagctctgttctgatcaatgccatctttcgagctgtacctgtcgcaccggaatcagtatggctagaaggtgcaggcctcctggagaaactgcatgccacagagattttgaagaggttctatcagcaggcggcatcggtctatcccttctccttcaagctgtggcacgcccatctgaattactgcaaagccagtgggagcaacactgagagcatcctggagagtgcgaggcagcgtggcatcgagctgaatctgacaccaacatagtgtgtcccttggatccaagctgcatgatgttttgccagtcggagatgttggtagtgttgtgttaactggagatggcgtgtagatatatcggtgatcatggtggtgtgagatcatttttgttctttaggtgcaggtttagtgggacatagtcgtcggtatcttacagcatgtgtttctgatggagtgatatggttagtaagcagtggtgaaggatacaggcatacgggcactggggcatataccatacttttggactagacgggctagagactgattttggagtccgttatgtttccattttccgttctcttggttttctctgtcgtcaatgtattataatcatgatgatgaatggatggagaaatgagatgagatttttttgagttcactcttgcagtttcggttattatatttttgtgctgtcttcgaatctgatttggtcgacggcatgtttggaagtaaagtattttaaaatcaggttttggaatacaaaaaaaaaaaaaaaacatgatataatctttgtattttttacattgctcttagcaacatatgtttggagataaagtatctcaaactataatatttagtatacgtgtacaagactagttatagacaaactttgggttggagtggagttttaaatactctaaaaatattatggtatctacaaaaccatggtacataagggcacaaggcagagttttagttttttttacaacgtagccaaacatttcttaataaaaatcactatggtattctctagtaccatggtttaccttgaaactctaaaaatacttagttttcaaatacccctaaatatatatagtactccaaaagcctagatataatcctagctaaatttaaagttacatgaggacaaaaataaacaacttcataaacagggtaaaccaataaactaactctgtaaatcttttctatttatatttaaatcaactcaactgtgtaaatcttttctatttgtatttaaatcaactcacaaccagccgccgcgagccactgccgaacaatttggctttgtagatgttggccagaaaacaacggcttcacctaaatgttgaaacgcacggccaatacagtgtgtccagcctgttctccctctccgagacaaacaacaggctggttgacgtggcccttctccagttctccgtatcctcgttggcgccgtgaactgaggactatccgccgccgtcgccgcgacctgaaactggaggccgccaccgccgcgacatggcgcactgaacgctgctgccgtgtgacgcccangcagagaacgacatggtagggagcgacacaggctcaaaacgggcacaggcacgcgggcgggggaagagaaatagacgtgagaagtggagcacatgtacg

SEQ ID NO: 5226 - DNA, 6131 bp, Zea mays
  misc_feature (2516)..(2516): n is a, c, g, or t
tccctcaagcgaggaatctccatattttggagtctctcacgccttacacaactgttctccaataaacacaagagtaaaagggggaagtttctacaaatattccaaaagtaaatttaagatgtaagattaatagttttattttataacaattagaatcggatagtatccactccatggtaaaataaatgttaataatacatttatttcatattaatacatctgtcttttttagcttttgagtttctgtctatgtgcaaatagatgattatttttctgtttatgctcaaatagttgatgataaatctaaacacataaataaaacgaatacattaattattgtatgaattaatttgaaagttaaaacgaattttatttgaattggacgttttgtcgtatattcacaaagaaatatgtgcagtcgcgggctgcgagggcggggtctggtcacggagccggtcaaggtgcagtcaagcagcgacgaggggaggcaggcggtcagagactcagagcgcgcagaagaagctggcgaatcagggcggctagttggacttgacgacttgtcacgtcccgtgcgtgccgaacttgccgtgcgcagcaacctacctaccccggcccaccgttgcggtcccgtgcatgcgcagccgggttccgctcccgcggtcaccggcgccggccccggccccgccttccgtttcagtgctcttcggctttcacgcaccggggcgcgcgcggttgcatttgcgtgcgccgctggtacccgaccgtgcccggtgagtcggtgaccgcggtgaagacttccgaggctctcgtggtagcacgacatatgtttcagcgacccgactaggcctgtgcgtggcgcgacgcgttccgatgcatggtccaagcctgcctgtttcaagcatttgttacagtgaacgagttatcaaccagatgttttgctgaccggataaggaatttttgttatttttttacaaatgttaaattaaaacaagaaacaaaatattcatgttttttcggtttgttactacgctaaattaaatcaagaaacaaaagctcgtcaaattaggaagcaaaaaaaaaatcaaatactaggcggcaatctaaggtaggaagccaaatccggcctttcttcctctcggaaaatacttaaaaggcccttgttccttgtacccgctgaagataagacccactaaaaacacgacccacatgtcagtggaatttcaaaacgctgccagttccatccccattccgaccctgccgccgcacccgccccttccccagcccatccggcccggtcccttcagattctcgacagtccgcgttaaataggccgccccgctcgccttccactcctcgttcccacacccctcaccgcgtccgcctcccctaccatctagggtttctagggttttcgaggaggaggaaatggcgtctgatagggtgctcgggactgtgaagtggttcaacggaaccaagggcttcggtttcatcacccccgacgacggtagcgaggacctattcgtccaccagtcctccatcaagtccgacggctaccgcagtcttaacgacggcgatgccgtcgaatacaccgtcggcagcggcaacgacggccgcgccaaggccctcgatgtcaccgcgcccggcggcggcccgcttgccggcggggaacgtcccgacggcggcaacggcggtgggcgaggcggatacggcggcggcgaccgcggttacggcggcggcggtgaccgcggctacgggggaggaggcgaccgtggctacggcggcggcgaccgtggttacggtggaggtggcgaccgcggctacggcggcgaccgtggctacgggggaggcggcggctatggcggtgggtacggtggaggcggcggtggaggcggccgcggctgcttcaagtgcggcgaggagggccacatggcaagggactgctcccagggcggcggctacggagggggaggcggcggcggccgcggcagcgagtgctacaactgcggccaggagggccacatctcccgcgactgccccaacaaaaggcgttaggcgcggcgccaccgtcgcgtcggatccggcggagtcccatgtcgcctctcgccgcatccctacccctccaaaggtatcgctcggctgactcttgcgtgaagtcgtcggagcaaactatctatcagtagtactagcagtgtcgtttcgttttggtctgtcgtggcgtggtagtaagaaatgcaagtgagcagcaccagtatctttccgtttgaatcagttgtaaggcagtcatggtcatggttggctctgccggatctatctgtcatgaactatctatattatatcattatcaatgttatgcaatgagtctttggcattgagttaaggtaaaaaaaaaaaatgcctttgttgattcttttggttggttttcgttcttgtgtcgtctgtaatctttgcaggatcaacttcggcgtcctttttgtgttaaattatgatagcggagtgggattgttgtcttaagatcnttttgtgttgtattatgatagtgcatagtggagtgagactgggtctcaaagagatggggaaattactactatgacgaaaattcgagttcatcagaataaaggatgaaatgtattggggggagaaggagccgaaaggtgaagagtggtcagatggatggtgtattggtgcggtaaagtgtgctgcaaaagcaagcaggcaccaggtgcagtgctgctgctgtgcagactggcactggcattgctgttttggcaacagagagcgtctgggtctgggtggcatggtatgggtctgcttcatgcacgagcacggcgccaggctctgttttgtccgcatcgcggggcggttgtggaaaagcgaggggcggtttccatttctgttgcaaagcctgacagcttagcgagaccttttatttttctgatttcctgcttcgattccaactttcatgtggtgtgtggtacgggcagtagttgcgacgcgcaatttcgcatctcataggccatgaacgatcttcattttttttccttgtcctccgctgggttaatgtttgtcccatgtattagtggcgaagccaaatcgcaatctccaaatttgattgaaacgaatcccaaagttttcatagttgggttcattccaagaaaaaagtgaaagctgatgtttcgcacggggaatcttgcttgtttcgtttcgcgccaaaagtgaaagctgtgtgtggatcacgttttcaggttacacaagtacagatctaaacatccggcctgtgcccgagtatatcagatttacggacgctgttaagtaatttgttcttgtttgccgaacgatgaaattcctgctatgaacgcttttctctctcatggaagttcagttctggaccgatacgaaaggcatcttgagtcattggtgaccattgttggggaaaatgagatatctctgcaacttattaaggtagtaaccaagttgtttgtgcaatctcaatcgtccgatgaagctcctatcccgtagcacaccacacatatcacttttttgcctcccgaccctaacgtcgcccaacgtcctcccctcaatctcaaatgttaaaccgtcctattcgtcaaaatctctcgtactgaaccatcccgtggcatgaagctgcttcgtctcaactgacttcggagctgaacattattagcgtgttttgtttgaggaatgaggtagtacatcaatttctcagtcctcactttcttgtttggtttgtggaattgaataagctgatctatcactattttattccttataagccaataatttatggaataaatttatgatacgtcatcttatttaaaatggattgattgttcaaaccaaacacccctatcttatattgacacaatttgtttcagacctgcagcatcacggctctccttgatccggaggttgcacgggtcatgggcccctgccaagcccgagtttggcccaactgcgcaggtccattcagggcggcccactcggcgtccaggaaaagccggacgagagggccgcaagtgtccgcggttgtcgagatgatgcagcttttgcttggagcttggtgagcccatggtgctcgaccacacataggagagcatataccagaatggaacccagtacgcaataatatgctgggagcctgggattgctggtcagtaccgccgattaggaccaactcgcttcctcggatgaatgaacgctaatttaaaagcttcgttcttgagcacggaagcacgaccttacttgaacaggatctgttctataggatcgtaccgttgcacccttgattattaaggaggcaaggttgatgaaccatgacctgtgggccagagcgtgattaacggctattaaggaggcaaggttgatgaaccatgacctgtgggccagagcgtgattaacggccaggacctgcttgatgtctgtttccggagctgtagaggatcgttccccccttctggggtgggctcataggttgttgacaggttctcttttttttctcagcattgctcctcgtttttaagactaacgcgccttcttgttttttccatcaacagagcaagagctacagtttttttggcactcgagaagtttcttcaaatctgacttcatgcgattgtgcgacacacatgattctttctactcgatttgcagaaagttcacagttgtttccatctttattttcttgttggttaatgcaaagctacgtattctacatctgtctgcagattctcgagtgctagtctcaatgtcttttattctcttcagtttgcagtagtgatacttcagatgtataatcttgttttactatttggttttgtttatttcgaccctcttcctttctacgcttttactgcaggctgtgcagaagttgattgacgaggaattcgaaagtattgtccatttgcggacgtcgtggtttcaaaatagagtttgaacagcacggcatggcttcatcagactttctagagcagaaaacaaacttgaggctcttctgcaggttgtgtaaactcttgtttctcttcccttctgtgcacacgcatctgtctttccatacacttgtatataaatgtatatatatacacacacacacacgagcgcacattgttcagttattgttgcttttttttttggtctgtaatttagctatgtcagaatgacggatcgatgattccaaattttcaattgataactgttgtgaaaacgtggagtatgaatagaatcgtatatccacggttaactaccatggaaaggttccagctggactacaatcatactaggaaagtagggaagagctgagcgcgtcaagaaggtaaagctagagcaggcacgaccagaatgaagcccacgcattaatattacacataataggacagcatatagcagaatgcagcggcccagtcccgccgattagcaccacctcgcttgctcagatgagggaacgctgatttaaaagcttggttctcgagcccggtaacacgaccttacttgaacaggatctgttctataggatcgtactgttgtatccttgattgataaggaggcaagcacttaaacctggttgatgatccatgacctgtgggtcagagcgtgattaacggccgccaccggctctgatgcctgtgtccggtgctgtagatgatcgttcctccgccagttctacctggctggggtggcccatgggttatctgacgggttgtcttttttttgtgtcctgcaaaaatattgctgctgtctacctcggttttgaacacatatctttcttgaatttgggattaacggggaagtttgttttggaccatgcttaactcccatgtgtgctacatgcatgcgttgggtccttaccaggcgttagttagttttgagcactgcacaccgaggaaaaaacgagacgatcctagctaggcgttagttaccggatatctttcttctgaacaagatctgtcgtatactcgtatacagctgcgaagcatggcctgtgggaaatgtaagggcgtgattaacggcttggattggagcttgagacatggtgttagaaataaatgcgacacaaataggatcaatcacagagaagacacggatttaacgtggaaaacccctccaaagtgaaggggaaa

SEQ ID NO: 5227 - DNA, 1023 bp, Zea mays
ggcgattgggttcctcgaggccccccagagaactgagccaaaagaaaaaaaaagagctactacagcaatggccggaggagacgacctgaagctgctgggcctgtgggcgagcccgtacgtgctgcgggtgaagctcgcgctcagcctcaagggcctgagctacgagaacgtggaggaggatctgagggacaagagcgagctcctgctcaagtccaaccccgtgcaccagaaggtccccgtgctgatccacggcggcaagcccatctgcgagtcgcaggtcatcctgcagtacatcgacgaggccttcgccggcaccggcccgtccctcctccccgccgacccctacgagcgcgccgtcgctcgcttctgggccgcctacatcgacgacaagatgctgcccgcctggaaccagtcgacgatgggcaagacggaggaggagagggccgaggggaagaagcagtcggtcctgacggtggagacgctggagggcgcgctgagggactgcggcggccaagggaagcccttcttcggtggggacagcgtcgggtacgtcgacgtcgtgctcggcggcctgctcgggtgggtgcgcgcgtcggaggagctgcacggcgtcaggcccttcgaccccgagcggactccgctgctggcggcgtggtcggagcgcttcggcgcgctggatgccgtccagacggtgatgcccgacgtcggcaggctgctcgagttcggcaaggcgttgatggcacgtctggcggctgcggccgccgccggtgcaagcaataactgaaaagggcatggtgtatccgtcatgtgtttcaggttttcgtatagtgaacaaaaaaggaaaaaataatgctagctacgcatcggaacgcggctttgtgctttgccgtctcgccgttagttcagcttatgtgatgtgagtgttgccgtgcatgtgtgtgttacttcagatgtatcctgttcggttcagtgattatatggaacattttattttggttggataaaaaaaaaaaaaaaaaaaaa

SEQ ID NO: 5228 - DNA, 1579 bp, Zea mays
aatgctgtggaggtcaatgaaatgtggcgtgccagggaaaaggaactggagttggagtcaaaaatgatgggcccccgggccgcaggtattcggcagcgtgattttacaggtgagaagcgcaaaagtgaaagaaaccatagctccagctcaaggattgaacaagaagggaccacttatgatacttcgtactcagaccaggaggatggtctcagggatgatgaaattgaaagatttctttattcaagggcgaagcgaggacgtggggctgttggttccaggatggacgagcctggtccataccttgattctctgtcccatcatcaggacaatggacctagcccggacatacgtgtggaagaaaaatgggaacgcagagtacaaggcccagagaagcctccattttggggatgcaagtctctcgatggtcattggcgcttgggcacattggatggaaggccatcaagctctgaaccacagagcaaaaaagaaaagaaaagtaagctggataaaaaagataagatagagaaaaggaaggaaaagggcaagaagaaatccaaacatcgccaccaccgccatcgcagaagcagcaggagtgagtgagtgatgttgcctgttagcagaacagaaaaaatggacacaacggttctgccatgaccatgagacaagctagctgactgttcctgtgtcttgaaacctgtattgtatggaaacgggatattgtgtaggcttatacaatacaatgttgcgatgtcacatcgtttgttgaagttttatcactttgattaacatctgcaacaggaagttttttttccccaaaaaaaaaaaaaaaaatattgggcgtcgaatattggagtccgaggagcctgttcttcaagcagggcagcctgtcagttggggtttgtagctgaataaaactgtgtatggatgcgtaggccatcaatagctcttagtcatattagtgcacattttctatgatcatgaggatgagttacttctcaggttccatcgaaaagagcactgatgactgaggtgaaaagggcttaagattcacagcatgtcgtaatcatgctttggggtgtcatgaaccagtcgccttctaaagctgatccaacatgggcatttttctgcttcatgggacattgcgctaagttggggctagttaggatgcacccaatagtctgagggcgtgtggcctcacgccacgcctaagttgcggcggccgaggaaaggtgctgccggtggcggcggcttaggccagctaccaaacacgccctgaatacacctatttgccacggtgattggagattattgagaataaaattagtttatttcatcctcaatctccgtggaaaattatggatccaaactagcccttagacggaagaagatacattcaccaaggcttcataatatgcccaaaacatcaagaattgcatagttatcagatttacagttgtaggcttagctgagtactgattgtcaactcaaatgcgacgctattaatttggcaccaaatcctactagttaaaaaggaaaaaccaaatctgttgagcaaagagctccgtaatgatgcctaaat

SEQ ID NO: 5229 - DNA, 1314 bp, Zea mays
gacctgcagaattggagtactcctcagaggtgcatttgtttcccaatgcagtttttttttacttctattctttctcatagttagatcatgagcctttcatcaactagggggttggggcatagtgagaaaacgttagcaaaatcatctataaaaggtgcctatagggagtgcaacatcttgtgattttttaactgaatactggctgcatacttgaaaccctttccccatggcaaattgaataaataaactagagcctatctgcatttatattatttgggatgttttataatgtttacaggttacccaccactggtaaaaaaacaaccattgactaaaaggatattaggaataaaattttgtacctaaaaaaatgcaaagtgtattatggctttatctcgcattatttcattcaaattatattagctggcagttgttattgcggggtcgcgcccgtggcccgccgcagaggccaatgtcagtcccaatagccgtgtctatgtgagcaaggcccatgatgtcatgacaaatgtgattgcaaagggttcagcaatgagacaagacgcagtgaacaaggctaaagcatttgatgagaagcatcaatttagggctaatgcatcagcgaggatcaattcctttgataaacgtgttggcctttcggagaagataaacaatgggatatccgttgtcaatgaaagggtgaaatcagtagaccaaagattgcatgtttctgataaaacaatggctgcattgctggctgcagagcgcaagctaaatgatacaggctctgctgtgaaaaccaacaggtatgtgtctgctggaacaagctggctgaatggtgcttttagcaaggtcgccaaggctggtcatgttgctggctcaagaaccagggagaagttccagttggctgtgtcaaatctaacagccaaaggccctgctgttgttgcctgagggggatgctggttatggaagctctctttctgaggaaattctattggaagtccctgtgcaaaagcatttcctttgattgtgtggacagtgtggaaaataactgtgtttcagtgttatcttgtctgtctttccttagttgcaggctattcggtgattcttttgaggtttggtgtatagatgcgttcagtttttggtattttagaaccccattcttttagtgttgaagttaaattgattataggtgatagtggcattctattgtattgactcaatctatgtggattcttcttgatcgttgatgcctatgcttcaccgcttctccccacactgttgctccaactgagaaaaaaaaaaaaaaaagcggcc

SEQ ID NO: 5230 - DNA, 1156 bp, Zea mays
ttgggaccctcgaggcgcgtgctcgcggcccaggcgcttcaccatcggaaaggccacagctagggttcgatacttcgatccccactccatctccaccgaagaccgtcgcgtcgctccgccaccgaagcagctcaaatttctctataagatgagctggagatttcctctcttcggctctcagcagcagcaagcagatccaagtttccaggacatccctacgcagtcttggtaccctccctcggtggtaggttcctcttcacgtccatccacccctacctcttctagtgctagtctacaccaaagagcttcagatagtccgcagtcttcatcccgtgggcaaccatctcctgctgaggctgcagggataattgcccgtttgaaggataagagtattgaggagttacaaaggctattgaaagacagagaggcatataatgcattctttaactcacttgatcaagtgaaaacccagaacaatgtgcgtgatgagcttaaaaaagagacattgcaacttgcaagggaaaatttagaaaaggagcagcggattttggaacttaggaatcagtgcacaataattagaaccacggaactggctgctgctcaagaccgcctaactgatttggagaggcaaaaggatgatattatgaggtcctattcccctgccgcactgctcaacaagctccaaacatcaatggcaaagttggatgaggagtccgaggagctgcaccagaagttcctggagaaggacatcgaccttccaacctttgtgcagaagtacaagaagctccgcacggcttaccacaagcaggcgttgctccatctcgccggccagacatcactccgctgacatccggccaggcgtcatggcaactttgttgtattcctgctcgcctgttcttgttctacactatgcttggccctgttttacgagtgcagcctcttgtagggatttgccgaacatcagcggatattgcatgtatagttttatgtcttgcaaaaacgtcttatgtactctgtcctggtgtagtggtgtttacgtatctagtgtccaagttgggattcatttgtggtaactaaacactttgcctattttgttcaattcgatgataataaagcttttgtacgtttgtgttcacctcaaaaaaaaaaaaaaaaa

SEQ ID NO: 5231 - DNA, 1144 bp, Zea mays
ccggaatgatagtataccaaaaagcttctcaaggaatctgacgattacaaaggatatgaaggattctatatttgtgtggtatcagctggatgacttttaccagaaccataggaggtatgtcaagagccgtaatgatgcacagctaggagataaaagtaaggcgactgactttaccaattgtgatcctgaggccaaaacggtagacggaaaaccaattgtgccttgtggtcttattgcatggagcctgttcaatgatacatataaactcattcacaacaatgtaaccttgagagtggagaagaaggacatctcttggaagagtgacagagaccacaaatttgggagtgatgtcttcccaacgaactttcagaaaggacctcttaaaggtggaaaaacacttgatccaagtatcccgttgagtaagcaagaggacctcattgtttggatgcggactgcagcacttccgacattcagaaagctgtatggaaggatatatgttgatctcaaggaaaacgatacaatcacagtccagttggacaacaactacaacacctatagctttggtggcaagaagaagctggtgctttctaccgcaacctggctcgggggaaagaacgattttctgggccttgcgtacctcaccgtcggcggactctgcttcttcctggcattcgcgttcaccttgctatacttgataaagccaaggaaaatgggagataacagctacctgtcatggaacagacccccttcaggtcgctgatgatgtgctttggaagttaaatgcgatacacaggcagcaccaaacaaattcagattatggtcggaatgtatcttgtaccacagagaaattttatccgtgctcgtcggtgtagaatatatacggcacccttgcacatattgtacattacatcgaaacacatagctttgttttctacaaaattgtatactcaaaagtttcagaagtggatgccagtagttccatgctttgtttttttgttccccttaataaaacagctaaacctaacctgcatgactgagctatgagatgaacatgagctcttcgtaagtgaccagttctcgaaggctaggcatttgcagaaatttggacttttggattccaaaaaaaaaaaaaaaaaaaaaaaaa

SEQ ID NO: 5232 - DNA, 3327 bp, Zea mays
  misc_feature (1204)..(1204): n is a, c, g, or t
catcatcatcatccggatcctgccgccggcctcttcactcaatgaagatggagagctcgctcgctagccttgagctcgacggacgccatgcagcgcagcgcagagcgcgcggatccggatgactcacctgatgtccgcctccgcggcctgcacactggcgccgtggccggcggtctctggccgcccggcgccagcatgcatctaatctagctttcccttcactcagctctctcggtcgaccgccagtatagtgctagtatatatgtcgtcgtccaagatcgcgatcgaccttctccgggaacggcaaagcgcacacgagcaggcggcgcagcagcctgccgctcgatccgcgcgcgtccatcacacagcatgcagcacagtgcgtctgcgtgcacacagccacacacacacattctctctctctctctctctctcttcatgatccgtccatcggtccatgcatgcatcgcgcgctctctctctagactctagggtagtagagtcatgaccggaagcatatcaagcatcctgcatgcatgcatgcatgcaatgatggttagttccacttcctcgcgcagagggcagagcaatccaatccaaccacaccacaatggcacaatggcatacgcaacacatcgcatgtgtactcctcctacgtactgcagctacgacaaccattgccgcgcctgcctgctgggtgctggcttgcaccctagcttgccattgccacggagatgggtgcatcatatggcacgctgggtacaaggaagcgtcacagaaaggcgctggcatgcatggcagaagagaatctgcttccttgccctgcccccctcgcttactttcctttctcctttttctctttcttttccggctggctagcccccgccccgcctgatagatctgctgccctgctgcccccacgacaccttttgtcgcaatcatatctctctctttcaaaacgagtatctgctacttcaataaacttttatctaattcatcgtcgtcccggttagcgagttatactattcacacgggattagaatgcacatgctattggataatgcgcaaaacatgtgtttggatcatgcgcagcataggaatgcaagacacaaaggaaagtaaacacggcatcatgcttattttcttccaaaattgctatggagaatgctattccataggaattttaaaggaattgataggatcnaatcctttgttccaaaggctcttataggaaaacttcccataggaattgaatcctataaaattcctttgtttttccttccttctaaaggaggaggctatagtgtccaaaattattccgtttctttgcaacttaaagtctctaaatattatatatatgatacttataagatgatgaaattatactcgactcaccgaccaggccatgacaccttttatactatagtactccagtagactgtagtacgcaaaaaggagcaagagaatttgacagcagcagcaccggttgctgctgtgctgggacacagagagagtacgcagtacggtaccattcaaatccaatcactcactgacacccattagtggtgtcacttaatgatgagatacctacggggcaaagcaacaacacgggcgtccatcagcgagcatccgcccagtgccccaagccctctgctgcaccaggccaatgtcgtcacagccagctcgcagcagcaaatttacatgcacacaagatagtgatccctaccaactatatggccatggaatggtacgagtcgctagacacaatcataccagggggcacgggcaggtgcagagccgcatctatcagtagtcagtagaggcgaggcagcagctcttttgtctcctcactggtgccaccagttcaagatccaccacacgtcgtcttgccatgcatcacacacacaaacacgcacacgcacacacttttcttttttcctttttatataggagtagtacttgctaccaacctgtcaaggtgaattcattgttgtgaatattcccgggccgggccttctcgcctttcaaggattcgaattatggcagcctcaaatgatagcagcgtagacactgtgcggccctgccgatcccacacaatggagccaaagtccccagtctgtcttaagaaggaatcattgcaggctacaaataaaaggtgctcatacagaagttttcaccaaatccacatacgcgggaagacagtacaccaagtacacagctacaggcagcagtctaaccatatcaccagagctgcgagagccatacgcagccatcgcagcagcagccaccggcggagagaaaacctctacattacctgtcatatccgccgccacccacccggcggcctccaccgtagcccctttctggcatccgatacggtgaaaccgatcggtccctccttgacctaccaccaccataaggaggcggcgagtagccccggccacccctgctttcgtagtagtcccgagggtccctgtggggaggagagtagtccctgccgtccctgtagggagggtagtcccggctgtccttgtaggagggataataatcccgactctccctgtatgaagagtacatgggaggcggagacctgcggtagccatacccgccgccgccattgccgtaatactcatcacgcccaccaccatagcctctatggaacctcccacgctccctacgctcgtaccgatggccaagatagcttccaggagttggtgtccttgggcgaccacggcgtgacttttcaactgtgatgtttcgaccttccattacagaaccattaagatactttatgcaacgctccgcttcttcaacagtgtccatgctgacaaaggcaaatccacgggaaacacgtgtatggggttcaagaacaacatggcaaccaaccacccttccatgcttagaaaaataatccttaacatccctttcagtaaccctcgaagagagcccagtcacatacagagtattcccacggttaacagcatcctcctccctctcttggcttctagatcttgacctcgcctgagatctaggatcagggacaggtgacctagactgagaccgagctggagattgtgatcttgacctcccttttgggtgccccctgctgtatgaaggggaccttgagtacctcctgcgcggggaatcggccatgtcgcgaaacggggacggggggcggcgcggcggagtggagctcccccagcggtcgcttgcgcggggctagggtttggcggcgcggtcgcttctcccccttccctcttcggctctccctttcggttgtggttggcgtgcacagcacagcactgggctctccgcaacaaattgttg

SEQ ID NO: 5233 - DNA, 3371 bp, Zea mays
ctcggtacccctggtacaaggaacgaagttttcttttttctgttctgctgggggaaacaaagaacaagaggggaaaataaaatctatatatttataacagatgaattaagcaccaagcacctgggaaaaatagaagctatatttttttcgtttacacaaatttcaaacaagttctaaatatgacaagaatcaactgactgcatttgagccaaaactttcgtacaaatagcaccaactacagtaatggacatgtagccagaccagatatcacctattcaattatcggctatttaccagagtgacacaaccagaaccccactgattaaggaaaagggcaaggaagtcaactttctgaattttgcgtctccatgaatatgttacacatcgaacctaagcatctccatgagactaagtggaacctttgaggctccatcagatgcatgttccgggaccaccttcctccaagagagtagaacagaaaacccacacatgatcctcaaactgcttgtacagtaatggtccaaccagttccaagtgcttcctgcacgtccatcatcatccgccatcacgtgagcggaactctgctgccctcaaattcatttcatatctcaggattttgttcgcccattggatactctgatacagcactgtcagcagcttgttccgggtgcttgattgaatcgatgtcagatgaaacaggcgatgctgcttctgcctcaggtgctgaagatccaagcataccaccactcttcttttcctctcctaactcggcatcacaaagcataacatcgtccatggaattcagctgcttctcactttcaacctcaataccaggaactgcagtatccttctcagcaacatcaccaggttcagcttcttcctccttccattccacaaactcgggttgactctcttttacatccggagtcagtggcctgatatcatcttcccgtttgtcaatggtaccatttgccaagacggtgtgattttcgactaggactcttctaggtaatgcgtctcgggcggagactggtagagttcgttcagaaccttctgtgtcatctattacttcgccaagaatgacttcatcatcctcttttagtgcggatatttctgaatttggagatggggaagcttctgggctaaccaaaccatcattcagtgccttgtcctcgtcaaatgcaaaccagttggaatttgtaaagagcgagccactttcttggtcgtctccaaggcgaagggaggagattactacctctgcagattcatcatcaaaatatacatcctcatcatcccgctcaagtgatgcttgagcctcgtcaatgtcctcgctactgtagataccatatttaaatgcctggcttaaattgctagcaagtgcagccacatcgtagtccctatctcggaagtcttcatcatcgctatccctaccacgatcctgcagtgatgttggtcgaccgcaagcccactggtaaacattttctaatgcattacgcttcgtcagggtactggcatgccactcaatccaatcagaattttgctgcaaatgtgattgaaccatgatgtttgtgttgaccagctgaaggagcctgttagctatccgtgtcatatgaccaacaattcctatccttgggggagatcttccctctgaagacatagtatgcttagttaaatctgacgacagagcagagttcttctctgcttccagaattcttgtaacaagtttacagtcatcaaggacatggccaatcagtcgatcctgcttactctccaaacatgagccgatgatattctcgacatggtggtgcaagaagttgttaaacgggtactcaaaaaatagatctatagcatgcttgattgctcctagttgaatcagtcgtgtttcggcagctgcactaccaattgatagaagaacagagatgaactcaacaatcttcaagcgatgtttcccgagtggaggttgtaagctaccgtatgttgttggcagaacattttcagcagatgaaacatccagcagcttcaataaatcccctaggctatccagcatgccatttactgtctctggacttgcggtgacaagtgttccatggctcaactgactacggaaagcctgataggaagccgatacaagtctcttaggatctaacaaagatatgcacactgataatgagtggaccagcaccgatttaggccttgaatcttcaaaagcatgttgaaataacctccctacgaagcttggactggaaatctttgcagcaagtgctggaggggcgtatctggttactgcacaaaggatttcagcagcatttgcgtgaacctcagcagaatctgatgtgctgaacttgtcaacaatcatctcaaggacttgtatgtcatctaaccattgcatagaatctgcatggcttgaatacatagtttcatctgcaccgattaagcgaatcaaaacctccatgatagaagtaatcccaataagatcaacaagctggctaactatttcaggatggccctgcacataatgaactagttgaagtgtcttcctcatcgccaaacaaattactaccttagcaaagtaaccagccaacaatgtcccatgagggtggtcaggttttaggaaggagaaaagcaaattcataagatcttcatcctccactaatgtcttcatgatgacatccacgtcacatgtaaatatttcacaagctataaatggaaatctaaatatccttttcttttctgcatcttcaggagcctcctctacaatgtagcagagcaattgctccacttgaaccttatcccgcaaaaaattgattaagcgggtattcagtgctttgcactcctgaattatttcatcctcatcaagaagatcctccaacttaaaattttccttgtccaaaatagtatccacaggtgatgcagcggagaatcccggcacgtgccaaaacatcttgcacagtgacaattatgtcagtcccacactgtcacgatatcacaacctaagcggatttagagctgagatttccacatcatgagctggtatccggtggccagcggaggggagacgggggctccgaacccaggcacaggcgcacagaagcccgtcgtcgtcgtcgcggcggcggcggcggaacagcgagtgagcacagcgcgccctctcgcgatccgaagctttggaggcgctcgccaagccgagctggatccgggtggccgccgcgaaaccctataattcgccaatcgcgagatgaggaggactgggaggtcggaagggcgcggaggcggaggtggagtggaggcggatgaagggaagcagcagggcgaggccggaagaactttttttttttttgtatttttttcccggccggctcgaggtcccaatg

SEQ ID NO: 5234 - DNA, 3016 bp, Zea mays
ctcgaggccggccgggccgggatgcaaccctaaccacctcatcgccggcacgatcttccccgcccccactccccggctattgcctctgattggcggctctccgggattcacgttggtccggggtacggctcctgcgattgccgccccgtggaccaggaccagagcgtggttgtcggcagcgcggactctggtgctgcggcttttggttttgcgactggcaacccccctagcttggctgtgaccggcggaagcgccgtggcccccgacggtggagctcaggcagctgatgcctctgcgtaccaggccgagcacacggcgttgaatgggactgtcggcgatatgggtaattacccatctacaggagctgcagagaacggcgaagccgtccccaacgagacgggcgagccggttcctgagctatcgtacgaagaagccgtgctttcagcagaagaggctaggttatggagtgttgttaccgcgaattccttagattttaatgcctggaccgcacttattgaggaaacagagaaaaatgctgagaacaatattttgaagatacggaaagtgtatgattcgtttcttgcggaattccctctttgctttgggtattggaagaaatatgctgaccatgaagcgagacttgatggtgtgagtaaagttatagaggtgtatgaacgagcagttctcgcagttacttattcagtggacatttggtataactattgtcagtttgcaatttcaacatatgatgattcagatatcatacgaagactgtttgaacgtggcttggcatatgttggaacagattatcattccaatattttgtgggatgagtatattaagtatgaagagtcactggaggcttggagtcatctagctgttatatatacaagagtattggagcatcccatccagcagcttgatcggtattttaattgcctcaaggaattggcttcgaagcacagtttatcagaaatacttactgcagaagaagcctcgttgtatgttgtcacatctgagaccactgctcaagcgcctgatggtgaggcacatcctgatgatgttgataagcttggtcaaccagaaatttcgtcttcaacagacgcagaaagccttgcaaagtatgtctccatgagggaagagatgtacaggaaggctaaagagtatgaatctaagatcattggttttgagctagctattagaaggccatattttcatgtcaagcctcttgacaatccagagcttgaaaattggcataactaccttgactacatcgagaaggaagaagacattaataaggttataaaattgtatgaaaggtgtgtgattgcatgtgctagttattcagaattctggatccgctatgtgcaatgtatggaggataaaaggagtctagacctagcaaacaatgccctggctcgtgctactcatgtgtttgtcaagaagcagccggagatccatctgtttagtcccccccgtccggagcttaatggcgatatttttggagcacgtgcagaatatcagcatctgtattcagatttatgccctggctttctagaggccattgtgaagcattctaatatggaacaccgactgggagataaagaattgtcctgttcagtttatgaaaaggtcatcgctgctgagaagggaaaggaacagagccagctcttaccaacattgcttattcagtactcccgtttcttatttttggtcatcagagacttggagaaggcaagggagatattaactgtgctgcatgagcagttaaatttaacaaaaccagtgcttgaggctgtcatccatctagagtcgatttttccatgcgaaaagcgtattgaatttttagactcacttgtggagaagtttgttacacctgaatcatctcagggagagttggcaagtctagttgacaaagaagaaatatcttccatatttttagagtttttggatctctttggtgatgcaaagtcaatcaataaggcttcaactcggcatacaacttttttttcatgtaagagaagcattctgccatcaaagaaacggaaggctgatgatgctgttctgtcagacagggacaagtttgctaaaactgggtctgttcagtcagccacaggaactgatccaaatgcttccaatcctcctgtttggcctgcgacttctgaaacatctggacatcaatggggagcttcttatgctcagcaggctgcatatcctgcatatggaacttatgactacagccatcaaatgccacagcctgctcctcaaacagctgcctatggcgcttatcctccaacatactctgttcaggcctatacacaacaaagctacacacaacctgcagcaattccggcagcaccagtgccagcagtggtaccagcacctacaccggcgtcagcttaccctcagcaacctgcggcagctcctcaaccttattatggaacaacctactactgacaagtagagtaatcttcgatggcgatctgacgagcctgttaatcagcaggtttgtcgatacgaggtcaaaggcatcgcaaaaccctctgtactgccattgtttagccccccttcagacagatgccgtcgacgagatgatcgcttgagaacaaatttgagattggtatagtctgcatttttgtcgttagcatgtgtcgctagggattgctattgtttttcttgtaatagcataatctttactgtagaagaggcagcgggtgctaaccaatcctatgaacatataattaacattattcactgtttcatgccacctttcggagggctttttttttccccccactgatgatagcgggattcctgtcaagcacgctcactggtgaagtcctcggaacaaaattgtcaagatctgcgactacacagttcactgatttctactgtcactgtaggtcaaactatcttgatttgactaatttggaagggagattcggtaacttagtaacaatatatgaccaaatgactattttctgaaaatgcattttgtttagaatttatcaaattt

SEQ ID NO: 5235 - DNA, 1729 bp, Zea mays
  misc_feature (1703)..(1703): n is a, c, g, or t
  misc_feature (1713)..(1713): n is a, c, g, or t
gccggccgggctgagtgtccacaaagatcccgggctgctccttcctcccagaggaagcgtacaaacctggaggggaactgcccgtctcctcggctgacccgtccacctccttcttttcccctcgtgtccgccgctacacgcgccgccggaaccctagcctccaccgccacaggcagcagggatggagaaaggagcctcggaggcgtcgcccccttgcgctcgctgcggcaagcccgctcagcttcaatgccccaagtgtgtcgaacttaagttaccgcgtgagaatgcagctttctgcacacaggattgttttagggcagcatggagctctcacaaatctgttcacccaaagcctggtgcaccggcatcccagcagtctccagaaggttggaaatattgtctgagaaaagggcgggaacgtgcattgcaacttcctcgttttgattggacaggtccattgagaccacatccaatatcaaagatgcgtgtggtgccagatgaaattgagaagcctgattgggcgcttgatggaattcccaagatagaaccagatagtgatttgcagaaaagagtagagattaagacccctgatctcatagaaaggatgagagtaacatgtcgaattgcaagagaggttttagatgcagctgctcgtgtaattaaaccaggaattacaacagatgaaattgatagagtcgtccatgaagagacaattgctagaggtggatacccatctccattgaattactatttcttccccaagtcatgttgcacgtctgtcaacgaagtcatttgccatggaattccagatgccaggaaacttgaggatggtgacattgtaaatgttgatgtaactgtatactataaaggtgttcatggtgatttgaatgagacatattttgttggaaatgttgatgaagcttccaaacaccttgtacgttgtacctatgagtgcttggagaaagctattgcgatagttaaacctggagttcggttccgagaggtcggagaagtcataaacagacatgtttcaatgtcaggtttatctgtggtgaaatcttattgtggccatggcataggggaactgtttcactgcgccccaaacattcctcattattcaagaaacaaggccgttggtatcatgaaagctgggcagacatttacaattgaaccaatggtcaatgcaggggtttggaatgatcgtctgtggcctgacgattggactgcagtgactgcagatggtaaacggagtgctcaatttgaacatacacttttggtgacagaaacaggatgtgaagttttgacggcacggttaccctcatcaccggacgtttttccatggttgaagaagccgtgatggggaacgccaccaacagcaagtgatactgttacactgggtcagcaaaaagttttgttctgctctatcagtcggccaaagctgaaattttcaaatattctagatcagagtgattagcatgctactgctgaacagtcgcagcaattgtctatcctgcggaactatttctgggagtgtgtattgttaagtcggttttcttcgagttatacgagacgtatggcttcttgagatgtgtcaccaatatgattatgccatcagtttacttttgatttcacagaacacaaaaaaaaaaaaaaaaaaaaaaaaaactcgagcccggaaaaaaaaaaaaaaaaaaaaaaaaaancaattaaaanaaaaaaaaaaaaaaaa

SEQ ID NO: 5236 - DNA, 1003 bp, Zea mays
gaaacacatcatcactttaagatgggccggctcaggtagtgggcatcaaccgattttcctacactagtagacagatttctcagaagccgcggccgtcacgcgtcagacccacgcagcgcaccttctcttctccgccgcgtcgccgccgaacatcagcatcggatcgatggagggctgggacaaggggaccaagagcacggtgggcgagatcccgctgctgtcgacgcgcgcgggtccgcgggacggcgaggcgtggcggcagcggctcaaggaggagtaccgcgcgctcatcgcctacacctcggtgaacaaggccaaggacaacgactggttccgcatcgccgccgccaacccggagggaacccgctgggaggggacctgctggtacgtccacaacctccgccgctatgagttccctctccagttcgacatccccgtcgcctacccccaggtcgcccccgagatcgagctccccaccctcgacggcaagacccacaagatgtaccgcggtgggaagatctgcctcaccgtgcacttcaagccgctgtgggccaagaactgcccgaggttcggcctcgcgcacgcgctatgcctcggcctcgcgccgtggctcgcggcggaagtcccgattctggtcgactcgggcatggtgaagcacaaggatgacgaggcggctccggctgaggcatctgcctctgctgctcctccttcgtagttgccacttgcaacaactgagtgtccggtgagctaagggcgatatcggaaatcaactcggcggtgaaccgtgaaccgccaaataagagagatacctgcaaatctaaacatcatgtgaaacatgttccatacctgctgattgctgtctgcgtactaatttctatccaacttctaaattgtgttcgcagatttttatggtacacttgattaataccataaggtaacataattgcttaataaaaaaaaaaaaaaaactcgagcccggattttctgaaaaaaaaaaaaaaaa

SEQ ID NO: 5237 - DNA, 1195 bp, Zea mays
gcacgagggcgtgccccgtgccgtgcgaccatccctcccctcatggcgtcatcggcggcgcgatccctcgcgctcgtcgcgtctgcctcggcatcgctcggcgtcgggcagcggtcgtgggctcgcttggctgtctcttcctcttcggctgggtcggccctccccaagctccgcgggctccgctcgttcgccgcctccgcacggggcgccgtgatggggaacccaggccccggcgccgttgacgccgacgtcgggatggacgccgtccaacggcggctcatgtttgaggacgagtgcattttagtggatgaacaagacaatgtcatcggccacgagtccaagtataactgccatctcatggagaagatagaagctggaaatgtcctgcacagagctttcagtgttttccttttcaactccaaatatgaattgctactacagcaaaggtctgcaacaaaagtgacatttccacttgtctggacaaacacctgctgtagccatcctctctaccgcgagtcagagttgattgaggaaaattgtgcaggggtgagaaatgcagcccagcgcaaactatttgatgaactgggaatagttgctgacgaattacctgttgaccagttcatcctccttgggaggatgctttacatggctccttcagatggaaaatggggcgaacacgagttggattacctcctgttcatggttcgtgacgtgaagctcaacccgaatcctgaagaggtggccgacgtcaagtacgtgaaccgcgatcagctgaaggagctgctcaggaaagctgatgctggggaagatggcgttaagatgtccccttggttcaggctggtggtggacaacttcctcatgggttggtgggatcatgtcgagcaagggactctgcagggggcagcggacatgaaaaccatccataaattgtaagcctgtagtcttgtagatccgcgaagcacgtgctgtgctccgttgagaaataagcgtttctgcaggtgtttgcgctgcctttgttttagccatcattctgatggaaatagtcgataaagtcataatagagtgctcttaaatagggaacataactatttatattgaaacccgtctatgatgtgtaaatttctaccgaatgaatggaattatggaaatcatagtaattggcgagcaaaaaaaaaagaaaaaaaaaagaagaaaa

SEQ ID NO: 5238 - DNA, 2726 bp, Zea mays
cattgggtaccctcgaggccggccggggggacgaccctttttccggccgtccgtggtcccttcaatctctctgcgcaatcaaactgcggtggccaaccccggaagcggcggcgggcaaagcgcgcgacgcagagaagcgtaacttcaggccgccggtcgctctacgcatcctgctccccgttctcgtcggagatccaccggggcagcctttctttccccttcctcaatcaagtcgatccaatttcgcgcgcgggtcgggctcgccttctcctccagtctccacctccaccagcgctcgaggtcgacggacgctactcgcagcagttcttctttgcggtgcggccgagaagaagctaaggctcaggcatgagcttccgggaccaggagagtggcggggaggatgggggcaggacgtcctccgcctccgacctgcggaagccgctcatcaacaccgggagctggtaccgcatgccgccggcgggtggcgtgatgggctcgcggcaatctagcctcatggagcgattgggctcctctgcgttctctctccgcgacgtcgctatctcggcgacgctctgcacgctcattgtcgcgctaggtcccatccagttcggtttcacatgtggctactcctcacccacgcaggacgccatcattgctgaccttggcctctccctctctgagttctccctcttcggttcattatctaatgtaggggcgatggtaggcgccatctccagtgggcaacttgcagagtatatcggccgcaaggggtctctcatgatcgctgcgattccaaacataattgggtggctcgcgatatcattcgcaaaagattcctctttcttgtttatgggtcggctgctagaaggatttggagtcggtgtaatatcgtatacagtaccggtttatattgcagaaatcgctcctcaggatcagaggggagctcttggttctgtcaatcagctctccgtcacgattggtatattgcttgcctacttgtttggcatgtttgttccctggagaattcttgctgttctaggcattttaccttgttcaatcctgattcctggactgttctttgtgcctgaatccccaaggtggttggcaaaaatggggaagatggaggattttgaatattcattgcaagttctgagaggatttcagacagatatcacagcagaagtaaatgaaataaagagatcattagcatcatcgaggaggaggacaaccataaggttcgctgatatcaaacagaagagatacagtgttccccttgtgataggaatcggtctccttgtcctgcagcagctaagtggtgtcaatggcattctattttatgctgcgagcatcttcaaagctgctggtattacaaacagtaatctagcaacatttggtttaggggctgttcaggtgattgctactggagtgacaacctggttgactgacaaagctggtcgaaggcttcttctcattatttccaccacaggaatggtcattactcttgttattgtttctgtgtcattttttgtgaaggacaacatagctgctggttcgcacttatactctgtaatgagtatgctttcactggctggacttgtggcatttgtgattgcattttctcttggcttgggagcgattccgtggatcattatgtctgagatccttcctgttaacatcaagagccttgctggaagtgttgcgaccctggcgaactggctgacagcatgggccattacaatgacggcaagcctgatgttgaactggagcagtggaggaacatttgctatctacgccgtcgtgtctaccatggccctcattttcgtgtgcttgtgggtgcctgagaccaagggaagaacgctagaggaaatcgccttctcattccgctgacacgtcgtcatgatctaggtatgggaagccacaccacaccatgtgtccttgagtctgccgcggtgcgttcagttcatgaatcccgcagggatcttgcagccattctcttgcttggatgtaccaccatcttcagtgttcataccaatgtacattgtacaatatgacgacgacgccatagcagaaaggcaagtgggtttatgtttgtacgatggactagtagcagaaagcactcaacccctgtacgggttgcggaggagagcaatttatttgctgtatttgcctggttcaataccggacacaagttagaattttgaaaaataaaaatctgagcaaatttatccaacaggtaaagccagctccatgcgtttgcctgcatgcggtcatgaagtagaagacattggagcctaaatatctaggaacggttttgatttagaaagaaaaaggaaggaattttattctgaaacctgggcatggttgtgcagcggcaaacttgactgctgaaggggctgatcggaattaggtaccttgtggttttgaagcgttgtttgaaatcggcgtcagcctcgccccaccatcctcttctaatcttctgaaacgggggctgcaagatctccgtggacctcggcggtgatggccgccgcgtctgccttcccatgcggcattagcgccttcatgcgacgtcggaggcccggagatcaggaaaccgtggcatgtgagaaggatcatttccatggacctcaacggcggacgccggatggcaggggcatcatctgatgatcatccgcctgctgcgtgcgccgccggagatcaggaagccgtgcccagtcaacactctgcag

SEQ ID NO: 5239 - DNA, 3542 bp, Zea mays
tggctcagtgggaaggcttctcaacactgagctaggcctatcccttctgcgccaatttttatatcacaagcattttattttgggcttcaatatcatagctggggaagcatataggacaatagcaatctgctctgtagctcaaggcctcaagtgtatagagaaaaccctttgcatacgcagattacgagaaattgaaatgttttttgtagatatatacatgtacatatgttactccttaattgcatagctctgatattctatttccatccattttttcttcttctcaacgagcagcagctgcggctcaagcagcagcacatgcagctggtgcacaggtgacagcttcgcagcctgggacagctcaagctaccacggtttcagcagcagcagccacagactcatatgcaggtgcatataccagctacccccctgcatatcagcagggagcccaggctggggcatatcagcagggtgctcaggctggggtatatcagcagggagcccaggctggggcatatcagcagggagcccaggctggggcatatcagcaggggggccaggatggggcatatcagcagggggctcaggctggggcatatcagcagggagcccaggctggggcatatcagcagggagcccaggctggggcatatcagcagggtgctcaggctggggcatatcagcagggagcccaggctggggcatatcagcagggggcccagtctggggcatatcagcagggggcccaggctggggcatatcagcagggagcccaggatggggcatatcagcagggagcccaggatggggcatatcagcagggtgctcaggctggagcatacaactatgcttatgatgctggcacggcttatgcatatgcaggttactctggctatccagttgcaggctacgcgcaaagtgcagtgcccaactattcctatgctgcacctccgcagccaacaagcagcggtgcagctacgaacgccgcaggaggccagtatggggcagttggtagtgctggatatcctactgggcaagttcagccgagcagtggcactgcaaatgcagcgcaagcacctcctcctccaccaccaccggcagcaccatatccccccagcacatatgaccaaaccagaggagcccagagataaaatctgggatgtaaaccagatggatgtttgccatgcacatttgttgagcagacaaatatggtgaaatctgggatgtaaaaccaagatggctgttctgtgcctccatcccattgactagggcgtattttcaccaatattgtgcctccagtgcaatttcttttgtgttatatatcaccaccatttgttgagcaccgtagaaatgagttccagacggccgggacagcaaccccacatgtgtctttacatcaccaccatttatccacagcgcgtaatgtaatggcatcaacatcaatatatatggttcctggctgaccacatcatcaacatccatggaacactagcggctcgtcaataaatcgaacaaatatgcttttctttcttttttccagtcacttggaaaacaagcggacgtacaaaatgacgcctttaggaattaccggagatgctccaacatacaaactgcaaaaagaaagatccaaatacaaaaccagcctgcattgtcgcttgcgaggcccctgaacccaaattccaaaccggtgcaagctagtagagcacacggaaaagcctctggatgcagccacgagccgcccgcatagaaacaaacagaggagacgaagccaagccatcgccgtccaagacgacggccacaaataagaagcgtgagggccgaggccgatcgactcatcccatacgccccgaactaaataagaaacgtaacagcggggagccggccgagccgagctggcaaggataatcctgatcaagtactactactagcagtagtttacacgatgggggcaggcaataatgcgcgccaagtaaaccaaacaaccatttcatgttgccttggtcggcactttcagtttttcttttgatgaatagaatagcggttgacgggcggacagcgaagaccgcattgttcaagggcgttggatgcatgctaagctatgctccggatatgcgagactgattcccgcgaaattcttgcggttttttttttgcaagtgacaacgagggagacataacgctattttcttttcccttgatggacataattctattttcttctacaatatttcgtgtctatgaattgaagctgctgcagcagccggtgctagatttgggagggtatttatttattttttgtcaagaacatctctactcgtatagatcagaaatgatatagaaaacctctttgagctgctcttaaaaagaataaaatatggcatatggcctctaagtaatcccttccttggtgtcgccgatcgcgagagccaggacgagacggcgacatattcgacctcccccgcccggcatattacatcagccagaaatgcttctacgcttcggcatgaccagagccgtcatcatctgcttgcactagtaattagcttccgtgtttaaaaaaaacgatgttctatatcaatctgtctctgtattaatttgcctttaagtttttttttgcatggatggagtatattatttacacgcttagatggccaatgcatggtaatggtgttatcaaaatatcaatgtccttttgtgctgcatttcaagtccagcttgtaataactgctactagtatatttgtagcgacaataggctggtagatcaaccacatcttcctttctattgttgagagagagagagagagagagatagacgacggagcagcaaccaccgtcctgacggtttccaagccgatgcaccacgaaattccacttggatcagggcaatggctcgtctgccaagccaagtagccaacgctggatgcaggcatcgctgacgccaccggccgtttcgtttgaggaaagcccgggcacgcacgccatcttgtacgcgcgttgccactctgatatggatccaacagcactgcgagcgtgcggcgtgcctgtccatttctgatggaccgccacctctctttattttgacaggtaaacgacggcagtgacacggcatatgatggggggctgacacgcgccactacggccctacgggctcgtgtagtggttgcgaatatgacgtgccaatggtgtttacatataataactgcttgctaaaaaacatttagctctagttgactttataaagtggtttacagtggctataatagaccatattgatcaaataaagacgacggttgactgagtcgagcgaagacgccagagaacttaatgatctggtggtaacatacattgaaatcacaaacatgacgtatcagatacgttactcaccgttgagcatcatctgtggcactagacacggttagatagtctagccctgagactcgaacggtccggctcgcggggtccgtgcatagacgcggacggtccgcgcgtagacacggacggtccgcgcgaatagatcgaatcagacggctaaaatcctatc

SEQ ID NO: 5240 - DNA, 2434 bp, Zea mays
actgaggtggccccccacagcgaggccggccatccctttcctttccttcacctcactcgctctctcgcctctctctccgtgcggtgactgactgggcaaccgccaccgccctccccctccgtcgggtcttcgccggcgccaccagcgacgactgggcggtctgtgtccctcttcgccggagacgatcacccaccaggtggatgtcgattttttggttgacaagttgaaggttacgaactactttgatcctgaggtgaagaagtaatgatccgcccaggctcaagggactcgcaaaattatgataacaataatcaaagagttcatccgcaaccagttgatgagaacatgaatcagaacggggactcagtggacactatgatcgggaggatattcaacaacatatcctctttaaaatctgcatacattcagctgcaggaagcccacaccccatatgaccctgacaagatccaggaagctgataaacttgtcatagaggagcttacaaatctttcagagctcaagcatgcttacagagaaaaacatcctaagccaatagctgcatcccctcaagattcacgcttgctctctgaaatacaagagcagcagaatttgttgaagacctacgaggtcatggtaaagaagttccagtcccagatccagactagagacactgagataacccatttacagcagcaaattgatgaagctaaacttcggaaatcaaagctagagaagaaactgaaacagaggggcctacttaacagggagtcagaggaatctgacgaagaagagaactacttttccattgaattgacgccaagtttgtttacatctgctgtcgataatgcataccagtccatacatgaattttcaaagcctttgatcaacatgatgaaggctgcaggttgggatcttgatggggctgccaatgcgatcgaacctggtgtggtttacacaagaagggctcacaagaagtttgcttttgaatcctatatttgccaaagaatgttcagtgggttccaagaggagagcttttctatcaaggattctaacatcagtgtttccaatgaggctttcttccaccaattccttgcagtgcgagccatggatcctctggatgtcctgagccagaaccctgattcagtattcggaaagttctgtagaagtaagtaccttttgcttgtgcatcaaaaaatggaaggttctttcttcggcaacatggatcagaggaactacgtcatgagcggtggccatccaaggacacctttctaccaggcattcctaaagctagcaaagtccatatggttgctgcacaggttggcgtactccttcgacccaaaggcaaaggtgtttcaagtgaaaaaggggagtgaattttcggatatccacatggagagcgtcgtgaagaacatcatcctagaagaaggtgcggagaggccaaaagtcggcctgatggtgatgcctggtttcctgatcgggaccagcgtcatacagtcccgtgtgtacctttcagatgccaagtgtgctgactgactgaagattgcacaaggagcttgagggggtgcctttgctccttgggagagctaccagcagcataagtttatggtggactgttgtcttgtatgtaatgcgtgagacctgttgcttcaatgccgtgctacgtgattctgtccagtgggcttgtggtttccccatgttgcatttccatgtgttatacggctatgtaattctgcccagtgttttgcacacattatcagggtgattgattgatcgtgtaggctgcacttttcatctgaaatgtgtttgcccaatcaatcagatgattctgttggtgttccatgtcaagtgttgtagcttagtttctttgaacaaggtgtgtggaggattttgatggacaatgataaaactgatgacaatttagttgcttcatatggattccagcaaaaacatttctcggtcagaggtgctttaaccatttgccgatgaggaattcgacgaggacgacgacgacctcgatgacgaagccgccgcggacgacggcgaaccctccgcgtccccatccgaggcggctcgcctcgaggccgtgctccggcggctcaccgcggacgaggtctggatccgggtgcactagatattgcggctgcaaatgaagatgaacaaacgactgctacttcgccacctagaagtgtcaaatgggtagttaagaaaattacccctcgaaagaaactgaagaaccgtgcttatcacggacagtagatctgaaaaattgtgtgtaataaactgtgatgttcccagatctgaatgtgaaccgtgcatgtaccaccgacttatgttcccagatcatctgaaatgtgtgcttgtctgtctgtttattgccagatttagttcatgtgctaaaggaaatgtgtgcttgtctatgctgggatttttgttc

SEQ ID NO: 5241 - DNA, 3967 bp, Zea mays
  misc_feature (3416)..(3416): n is a, c, g, or t
  misc_feature (3429)..(3429): n is a, c, g, or t
  misc_feature (3959)..(3959): n is a, c, g, or t
cggtagcatttctcacttgatgtcactaaagctttgttaatcaattccaggttggtaaattctcccaagacgatgtttcaagatgtcctgagaaaacagtgaacctacaggatctgcagaacagcttgattgcatctaaggagcttgtaaaagtacttgcccacatatggggacctggagaactgaatccgtctagtgtatcactcatttctgctctacgttcagagcttgatgttgcccgttctcatgttagaaagctaatcaaagaaaagaagtctaatccctatgaaattgaggacttaaagaagcaacttgcagaagaaatggaatcgtggaaggtcaaacaaaaggagaaggttgcaaacgctctccaatttatagtttcagagctagacactgagaagaagtcaaggaaaagagcagagaagacaaataagaagttgagtgttgccttagccaacactgaagcctcactgcaggcagtgacgaaagaacttgaaagagagaggaaatctaaaggaagagttgagaagatctgcaacgagctcatcagaggcattgacgaggacaaagctgaggtggaggcactgaagagagaaaccgagaaggcacaagaagagctccagaaagagcgtgaaatgcttcaacttgcagacgagtggcgtgaacaaagggttcagatgaagctgctagaagcacggcttcagtttgaggagaaaaatgcagctgttaatcagctgcgcgatgaactccaagcttatctggatactaagaaagagcaggaaccaatgaacgatccaatgcaactatcccacgcgtctgaaaatggcgccaccgcagctgatgatgtagtccctgacagaaatggtggaaacttcagcgaagacgactcatcggaaggcagtgacatacactcgattgagctgaacgtcgatggcgtcaacaggacctacacctggagctacactccttcctcgaaaggcaggcagaggagcgcttcgaggcatgaatcgttttcggatagagggatggacggcgtgaactcgtggcgtttagagcaaagctttcggggcatggatgaggagctggagggagactgggcggaagggtgtagcaacggaatactgaccatggatcacgacgaggagaggtacctggcaatcaagaatctcagagagcagatgctggccgggtcagggttcatcctatcacaaggtagagaaaatgctgaaagagagtgttgtggcttgtaagataaactgcatatgaagagaattttaaagtaatgtgtcatatgggtcgctgtttgatgctaagatccagctgttcgagaattttaaagttatgttccatgattctgaggtcttgtatgtgtgttgctgtccatttaagtggccggaaatagtttataaaaaaaagcgcccggaaatataaaaacaaaaggaaaacgttcatctaatgtcctttaaccattgtgtgagtccaccaacttaacctgtctgatttagcttcttgagcagttttgactaatgtagtgttacatcaactgtcctccgtggcgccgtcgaccacaagtaaactgaacttttataatagttgaagggggtgaaataatcgttctaaaagtcattcaaatatatatattttagaataaatatatatttaaaactactaaatctgattcaatattagaaaatttattaaaaaaaattagcttggagaaatatggtagtagtttaagagagaaaaatcagagtcactcaatagttaaggaggtcagttacaccccttccaacaaattttttttttgaaattcttccaataaaatattgaaatatatctaactttgaaacatttagaactagaactggaccacaggccaaaacctgttgaatctttacagagaaggaatctttataggtttagactattcttttttaactagagatgataatagataggtgtaatgctggtagagcaaacacccatctatattgacacacatcaagccacaactgcatttaaaatgtcaaacaagtagatttttacgttcggacttgtaccggtatggatgatcgacaattacaaataattaaaacaaaagtgtcacaaatagcaaggtaaataaatataattatttataatcatacgatatataatgcatacgatatataatgtgatataaattacatttcaaagaagtgaagatgagtagatgatctagagtttcattagattagttcaaaagactcagctagtattctacggctcattgggtactcatggttgaaaagtcgcccccagttctaaaccttcattttacaggtcgagtcaaatgtagacccatgaatggaatttaataactagaaccacatctaatatatatgaaactctgggcgttggcgtcgattcggtgccaaacactagaatgaaccacatggcagtgctcttctaaaccttcattttacaggtcgagtcaaatgtagacccatgaatggaatttaataactagaaccacatctaatatatatgaaactctgggcgttggcgtcgattcggtgccaaacactagaatgaaccacatggcagtgctctttatggaaacgcggacagtttgcaatgtagagtcggacggtccgcgacctcgctgcaggatctgctccttctctgcatgctttcggatggtccgcgcttgtagcccggacggttcgcaatgacgcagagtattcttcttcgcatgaaccaagatctcgcctcccgggagggacctattggggaggagagattgtagggtagacttggggtcggcagaccacacaagacgcatttagacgacgtcgagccgaagagaagtgaataaataggttgatggaagactaatactaaggctagattactcctacttctaatgtatggaaagaataaggcaaatgttggaatcagaccactgaaacgtggcgtgtccgtcgggccgcccgcacacacggcgcgccctatccaggccgtcgggccacgacacacacgcccacacatataacagcgggctttaagtctgttgggcttacactcccccaaaaagctagcccatcagaggctgcaccatcaaccatataaatcatgcttgctcacccataatacacaatgtgagactattcccaacaatctctccctcacacatagttagccgagatttgtctaaaataacactgggccaaactggctctgataccaattgttggaaccagactaccgacacatgacatgtctgtcgggccgcccgcacacatggcgcgtcctacccaggctgtcgggccatgacacacgcacacacgtatagcggcaagctttagatctattgggccaatactcctccaaaaagttagctcatcaggggttacaccctcaaacatataaancatacttgatcanccacaatacacaatgtgggactattcccaacagcaaataagataaatgtaataaattagtttgattggattgcgtcctgcagtgttaatcacccatacccctttatttatataggaggggtttgcaactgtttcaagttggttaccaaacaaatcttgttgagtttgctgacaaataccgcaaaaaatcagaaactcgaactaattctgtttccgtgcagaccgttcgcgccgccacgacagaccatgcgggccacccgtcttaacgtgaacagtgggcacctaaacttatgcctgtaattgttatccctattccaaacaatctaaaatctatttttttcaaaccaacgtaattttatcttgaagtaatctcttttcacttggcctcaatcggtggttgagtccttggggcccttctccacacatagcgtctcaccctcggcatactatagatgtccaggtgggtcgggcttgccgagtggcccaaaacccggcatgggtttggcccagcccaatcccggcacaacacanagcgaaga

SEQ ID NO: 5242 - DNA, 1691 bp, Zea mays
ggggtaccctccgaggctggccggaagtctcctgtttcagctctcttcccttcactccatcggctcgtctgctcgaggccgcatcgggtgtagcgtggccccccctcgtcgccaccccaatcctcattccccaatcccgtccgcttctctccccgtcccttacctcgcccaggaggggagcctcccgcttacaaaccctagcctctactcctctgagcttccaccgctccgctccccatggaggacgaggacaccggccccggcgatgggggcgaggcctctcctccgcaccacgtcgcggcgtcgagcgaccgggcgcgcgacatggtggcgtccccgaccagctcgcgctctgtgacgcagacggtgaacgggtcccaccacttcgtgatccagggctactcgctcgctaagggcatgggcgtggggaagcacatcgccagcgagacattcaccgtgggcggttaccagtgggcgatctacttctaccccgacgggaagaaccccgaggacaactccacctacgtctccgtcttcatcgcgctcgcgtccgacggcaccgacgtgcgcgcgctcttcgagctcacgctcctcgaccagagcggaaagggcaagcataaggtgcactcgcacttcgaccgctccctagagtccgggccgtacaccctcaagtaccgcggatccatgtggggctacaaaaggttctttcggcgtactgctcttgagcaatcagattttcttaaagatgattgcttgaagataaactgtactgtgggtgttgtagtatcaactatggattattctaggccacattcaatagaggttccagagtctgacataggctttcattttggaacgcttttggacactcaggaaggtgtagatgttatttttagtgtagcaggagagaagtttcatgcccataagttggtattggctgcccgatctcccttttttagatctgaatttttcgatcatgaattgggtgaagagaagaatggaactgatacgggggatgaaatcaaagagatcgttattgatgacatggatcctgtagtgttcaaggctgtgcttcattttatctacagggacaatcttgttaatgatgacgagttgtctgcatcaagctctgactgctctatctttgatagtttgtccgggaagttaatggctgcagcagacaaatatgagttgccaaggttaagattgttgtgtgaatcttacttgtgcaagcatatttctgtaaattccgtggcaactactctagcattggctgatcggcaccatgctatggagcttaaatccgtttgcctcaaatttgctgccgaaaacctgtcagctgtgatccggactgagggtttcgactatctcaaagacaactgcccatctctgcagtcagagatactgcggacagttgccgggtgtgaggagccatgtagcagcggcttgaaaagccagagcgtgtgggcgcagctctctgacggcggcgacaccagcgggcgcagggtgaggccaagggtctgagacgcaaaccccgcaagcactgacctttgtaatcaaaagctgtcgtggtgtaaatgggacggcttttcttaattttcacttgagacaacgattgaaataacatgattgacgtgtttgtggtgctcgcagacaaaaaaaaaaaaaaaaaacggcacgagccccacatt

SEQ ID NO: 5243 - DNA, 2387 bp, Zea mays
cctttaattttttttggggtcgcaagatactggagggcattattatttccgatgttccaagaaaactcgtgtatagagcaggtgatacaaaataaaaggtactacaaaatgttgtcagtttaagtcttgccgtgcgcaaaaaaacaggtgggcttgtattacaaggactagcaacgggccaacaacacattgctaactaaaaacctatgaatactggtcaacaaaaatcgtaagatgtacattctcacaaattacagtcatatgtaaaatgaaactgctccagataaactatcaggcaaataacagatttttgtactctaaaaatcaagctattattggcctgtagcttctgtttgtagagctcacgacgatctgcattggtgtcagattaggccatatgggcccaccacgtaatgatctgcacacttatgaacgatcttcgtcatgtgtatgatttgggacctctccttgattgtcaagtggcatatactgcgccatgatagctctaatctcagagtccatgtatgaccttagtctgtatttgtacacaacataacttcccgctgccacaacagcaacaactatcaagataccccacactgcagcccatgctgctttagcctgaactgctgtcttgcttatgcaggtgtcatgctctctgatgtacaaaaggtcaccactgcaagtgcagtcatagccaccccatgtatctttgcagttgcattcaggacactgacaagcttttttctccttgcactcatcaatgtcttcacattttttaacgccgtcccctcggaaaccagctgggcacaggcatttcccatctccagattcctggcaagcagagaatgtttttccgttgcgagtttcatgccaacatcctccatggtttatcaagcattttcctggtccagcaggttcacaattgctgtagccatcgcctttaaattgtacgccattgaaagtggggcattcacacactctaccacggaaggtgtccctacaggctgttacattagcagatttgtcttgccagcagcccccgttgtcattcagacactcatttgtctctatatcatcactcaggcaaacatttggttctgtagtttcctcaaaaccagcacaaatagctttgaggacagctttcctctcaagcttccctcgatattgccggttgttcacaacaagtgtaggcaatatagtaacatctcctcttgaacctttcccaatctgagcatcttgttccattttaagtaacgggtggtcagaatcagcatttgggtctcccatgcatttatcgaccttcttcacatccagacctagtgatttgatgacagtttctgcacattttttattgtacttcttctccttcattggacaccttatgtgaaaatcagtcacataatcccaccagacccatggtttcttattttcgtttgcaactttaaacacacataactgtctgaggttctctaccaccacatcctttccttcgtagcctgtgctaaaatcttgctctggatcaggtgcacagtaccttccatggtttatgcattgagacttgcattgtttactgatcacaaatgcttgaggacagtaccaagtaatgtaatggggcgtgaattggctatagccacctttctcaagtagttgggcagctcctttaaattccttaagaaaattcatcagcatatcacatttaggcccgcattcatcattgctgtttgtccataactcatactcaacacggtcatctggatgtggaacagcctccctccaatcaagattaacattaaccatttccccatctttaacagccttcttcaactggtcaccaaatttttcatctattaatgcagaaggaatggttatgttttgtatatactttgaagcctcgtcatcttcacgaggtaaatccattgttatcaatggttcatccttgtcatcaactacaagtactgcagaggcaccagcattttgtgcattccaaaccttcttcgcaaataagcactcaccgcggtcgatgaggaggaacgtgggcatcgcgccaggcttggcacggaaggggtgcctgccgtcgaaatcgtcgcaagccttggcgttgtccttagggtagacgacggcgcccgccatgctcccgccgtactgtgggattccgaagttccctatagcgctgtcgtgtcgtccccgcaacgaagtcggcgacgtcaccatcaggctgttcttctccacaacgaagcgcgcctccgccgccgccgccgcgagcagcagaagcagcagcagccgaaacgcttgcgctcccatcgcgtgcgagctccggcgcatcggaagcgaggcccaacggaaaatagtcggatgcagttttttccggccggcccgcccgtacc

SEQ ID NO: 5244 - DNA, 2325 bp, Zea mays
gccggccgggcccggaaatcctagtcttgtggtggtgtgctgtgctgtcgtctctcgccgcgcggcccgattcttcttaccccttcttcgtcaagccgcagccgtcgcctcccttcctcaccaccatggtgtcggacgccagcaagaagaaggccgcgcagaagaaggcggccgccgccgccaagaggggagccaaggtcccgaccccttcatcttcgtcctctgccgacgctaaatccatcggtgccgtggccgcgctcaagctctccgatcgcacctgcaccggcgtcctcgcctcccacccgctctccagagatatccacatagagtctctttcattaacgtttcatggccatgacctcattgtagattctgagttggagctcaactatgggaggcgttatggtttgcttggccttaatggctgtggaaaatctactcttctcactgcgataggctgcagagaactccctatacctgaacacatggacatataccatctcacccatgagatcgaggcttcagacatgtctgcactacaagctgttgtttgttgtgatgaagaaagagtgaagttggaaaaggaagcggagattttggctgcacaggatgacggtggtggtgatgctttggatcgtgtatatgagcgtctagaagctattgatgcatcaactgctgaaaaacgtgctgctgagatattatatggtttaggttttaacaagcaaatgcaagctaagaaaactcgagatttttctggtggttggcgtatgaggattgctttggctagagcactcttcatgaatccaacaatccttttgcttgatgagcctacgaatcatcttgatcttgaggcatgtgtctggttggaagagacgctaaagaaatttgaccgcatactggttgtcatatcgcactcccaggactttctcaatggtgtgtgcactaacatcatccatatgcagaacaagaagctaaagttatatactgggaattatgaccaatacattcagacacgctccgagcttgaagaaaatcagatgaagcagttcaggtgggagcaggagcagattgcatcaatgaaggagtacattgcacggtttggccatgggtctgcaaagcttgcacgtcaggctcagagcaaggagaaaactctggcaaagatggagcgtggtgggctcaccgagaaggttgttagggacaaaatactggtcttccgcttcacaaatgttggcaaacttccaccaccagtgcttcagtttgttgaggtcacgtttgggtacacaccagataatctcttgtacaagaagcttgactttggtgttgacctggactctaggattgcattggttggtcccaatggggcagggaagagcactcttctgaagctgatgacaggtgagctggttccattggacggtatggtgagacggcacaatcacctgcgcatcgcacagttccaccagcatctggcagagaagctggacctggacatgtcggccctgcaatacatgatgaaggaataccctgggaacgaagaagagcggatgagagccgcagttggtaaatttgggctgtcagggaaggctcaggtgatgccgatgaggaatctgtctgacgggcagaggagccgtgtcatctttgcgtggctggcatacaggcagccgcagctattgctgctggacgagccgacgaaccatcttgatatcgagaccatcgactccctagcggaggcgctgaacgagtgggacggcggtctggtcctggtgagccatgacttcaggctgatcaaccaggttgctcatgagatctgggtttgtgagaatcaggcagtgacaaggtgggaaggcgatatcatggatttcaaggagcacttgagaagcaaggcttgtctatcggattaagggaaggccttggctttccttaccttctctttggagatgtattatcccttgtataattatgtattattataggccctccaagttttactagtagctagctgatcatctgagcaagtacctctgtatctgtatcctgctgagtctcataataagaagcgaaagttttgtagtactaacgtaattgtcacggcaggaagtgccatggagagcaaggatgcgggagaagagaggctgggagactgaagaagcaggaagtgcgtggtgtgcgtgctgttgggctcaatgtgtgtgggcgtgagtttggtgggttcggcccatgtaagtgacctataattctgtagcgaactgagaataaggcagacaagccatagaaccagagaaaagttcccaaccgtaacactggcagcgtacctggcggctgcag

SEQ ID NO: 5245 - DNA, 3390 bp, Zea mays
  misc_feature (8)..(8): n is a, c, g, or t
cccgcggnggcggccgctctttaactagtggatcccccgggctgcaggaattcgcacgagaccattacctagaacatcctcgtggatctcatccatcggaggtgctctcctcttcggcttccttcggcttcggttgcaagaaagaaaaaggtcacctcttaacaccaggccgccgccattgctgctccctttgttcgtttctcggcaccctcgatcccgagcgtggttaatccacgcatcgaccggcgaacgccaccgtatcccatctcgaatacctccgcgctcagcgtcatggacggcttctccaaaacgatcggcggtggtggccctaacgttccggcgggatcccaccccgcgggcgggagccaggcggcggcagggggaggcgcgacgcagcggacgcagtatccgtatgtgactggtacttcagtcattgccttgaaatacaaggatggtgtgatcatggcatgtgacactggagcctcctacggatcaactttgagatacaagagtgtggaacgcattaaggctgttggcaagcatagcatcattggagcaagcggagagttcagcgatttccaggagatcctgcgctatctggatgaactaactctttctgatcatatgtgggatgatggaaattctctgggccccaaagagatccacagttatttgacaagagtgatgtacaacagacgcaacaagtttgatcctctctggaactcactcgtacttggtggagtgaaaaagggtccaaagggtgatgagaagtatcttggcatggttaatatgattggtacccacttcgaggaaaaccatgtcgcaactggatttgcaaatcatctggcgatcccgatactccgtgctgaatggcgcgaggatatgacttttgaagaagctgttaagctggttgagaagtgcttgctggtcttgctgtaccgtgacaggtcatctatcaacaaattccaggtatgaacctattgatcttcgttacagattgctctaaccagtaaacattcaaacaaagctgttcagctggttgagaagtgcttgctggtcttgctgtaccgtgacaggtcatctatcaacaaattccagattgccaagatcacaactgaaggatcaaccatctacccaccatattccttgaagacctactggggcttctctcactttgaaaacccagcccagggcgctgtgggatcatggtagattaatgcgccgcgcacgccgcatatcatgccatgaacttaggcgaaaccaatctgtgctgctgaaatcgaacacttatgaacgtttgttctgaacatcactggaactctgcatttgcttgtatgacatgcttatggttcagcgagtttaattccaacgtttgatcacatgttgtgaatgtggaaaatggattgtgcgattgcgacctcagatgccgttgttgattgtactatgttgaaaacttgaaatgctaaattagtataggtaggtgacctttgccttgtggtcgttgcgtgaactctgatttctacggtttcttgcgtttgctttatgattcatgctagtgttaatgccctctgcgagtgatgggatcttggtagtctgtagtagatgcacaaactgtgttggcaaaactttccatgtacggatctaggagggaggttctccgtcagttaaagattccaatttttgacggaaagcgataccatccccggccaaaactactgctacgatgagaaagcgcaatgagaaatcaacaaagggtacaaggcatgaagacagaatcctgaggtacaacaaatgttgaggaatgtacatgacaaatctacgaagggtgcacttgctgtatcattcatggtaaaactgtgtcactgacacgagagcattaggcagatttgttacaaggcatggaacggcccaagattaaccactactattctttcgttacaaagaggctgtacaacaaaaaaaaagaagaagaatccggagttaaaaattgttgctgctctcaacgaatgtcgacaaatacctaactactaactgcctacgatcctcgttgctttctttacttgacaactctattgctcagcctctcgagctgcggcacgccgtagcttgcagtgagttccatgaatcgttgctttaggacttctagctgtcctagcaagtcgccagtagccacggtagtggcaatttgaccgttctcagactccgtgggttcagggcttctttcgttgtaccatttgactgcttctaattattgtaatttagatacaaactaattaagttaatatattagtataggtgatatatttatattttatcctaaatcatattgaggagatagttatacactacaatccggttaggaataatttcaggctacgtttccgtatgaaccgaacagacccatagtatagtgcctgtcaagtcacaagtttctacttactccctccagccatagtgcataaaccttatggaaagctttcaggtaaatgctgtctccagcaacgttctctaaattttatttttaaaggaatattatatgttctttacaacacactttaaaagattccgtcatctatattttcacatctccaacaacttaccctaaatttcatctcagtcttatcctctatatttttcctaaccatattaacgaaaattcattgatttttcgtatcggctcaaataaataaacttttagcattttacaaattattattttgagcgaacgaaaaaaacaatactgaaaataacaatacaatcaggagggggcatgggctgatttcttggatgagaaattgaaattcacgtggaagacagaatccttccttgtctttgttgggagtcctatcatcattgttacagtattatgcacagactgagcgagtggagagggagccgccacattagcggacgctggcgactggcgtcgtcccctgcttgagccttgaggctgtccgcagcggcgcctgtaaacatcaactgtaaatttttacagctcttatccatgctgcagcggtgaactgcaacaggaaccgtaaaaaaattacagctctcgggaacttcacagctaggcagctagcgcaccttctactgtcagttaggtgcggcgaggaaagaggtgaaaataaataataaaatatgtggtagttggtatagggtaaatatttagagtgaatatgaccgtggagtattatgagagtagataatcttgctgactaaaatgaaatatttcttttaaagtagaaatgtagggttctatgagtgcggatagcatccttactggagcatttaacgcgtgttgatggaggaacaaaagaggcaagtgcacactaaatatagcaaagagatgcatgtaacgaacctcgttgggaagagcaggaacgccttgta

SEQ ID NO: 5246 - DNA, 5453 bp, Zea mays
  misc_feature (5308)..(5308): n is a, c, g, or t
tacggatttttttttttttttttttttttttttttttaataaaacaaattcctttgttccagggtccgccacttgttagtacctgcgtatgcgtatcgccctcggggccttcggccggtgcttttggcgatcaatcgaaacacaacagcaacatctattgccaaccgtcgagtcttgtaatatcaaaagacattaaaattgcacgtacataaggctcacacaggaccggaccggaccggagtacttccattatggtagcacagcgtacgactccctcccttaaccgctacttaaacaacaagcaatagtgcaatacaaacgaacaaagttcaaacgtaccttcagaacggtatagtaacacttggtgcatgcatgcaaatcgaccgactgcgtcctataccatatcatatccgatccatcatgcatcggtgaagtgcagcactgcactggtagatagcgaagcgagcgatagatagatagcagccattgcattgcaggtacgtgctaggcgtccatgcgcgccgggtactggtcgatgcagtccagccaggggctgcgcgcggggcggcgcacgcggcggacggcgcgccacaccgcgctgttgcacttgaagcccgacccgaaggcgagctgccagacgcggtcgccgcggcggacgcggcccttggcctccaggtacgccagctcgtaccagatgctgctgcttgaggtgttgccgaagcggtgcagcgcggcgcgggaggcctccaggtcggcgtcgcgcaggcccaggttgctctgcaggtgctccagcacgtcgcggctggccgcgtgcatgcagaagtgctcgaacgcgcgcttgaagtccgggatgtagggcgcggcggccgaggcgtcccctggggtggtcggcggcgccggcgtggaggccttggacgggaacaggtggcggaacagcacgcccgcgaagaagagcagctgctcggagaagggcagcaccaggggccccagcgtggtgatgttggtcttgagcgcgtggccgcccacctccagcaggtcgcggctgatggacaggcccttgatccgctgctcgtcctcctcctggtacacggagcggaaggcgcggtcgtccgcgcccttgtgcgtgcgcaccacgtgctccagctggtacttggcgcggtggaagtcgcggcgccggttggacagcagcaccgccgcgcagccggcccggaagaaggcgttcgggatgagcatggagcgccgcttcccggggtaccacgtgaaggagacggcctccgtgctgaccaccacggccaggccagcgccgctggcctggagcatgtcgcgggccagatcgatggcgatgacgcccgcgctgcagcccatgccccccaggttgtagctcaggatgttgccgcgcatcttgtagtggttgacgatcatggcggacagggagggcgtcgggttgaagaggctgcagttgaccaccagcacgcccacgtccttgggccggacgcggcacttgtcgaacagctcgtccagcgccgcgaacatggccgtggacgcctcggcgcggccctccttcatggtggcgcagctggcgttgggctcgaacacgcagcgcggcatgtacgactcgtcgccgatgccggacttggccagcagacgcgactggaacgccaggctgtcctcgtcgaacttgccggacttgcgcgccaggtcgatgaactccgccttggacaccttgggcccgtccgccggcacacagcagcatcgcgtcacatcagaatcgcatgattacatatagtactgcatcatcgtctgcagctgctgatccatccatgcattctgttcccaaccaaaacacaatctcttcttccctgtacgtgttccgaggctgcgagaagcagcaagcacaaccacatcatcaggctacaccctttggaacacacggctcattgattgctgggccgatggaccgagcgcccaaccgtttgtgatgggtgtggtgacctgtgacctcaacccaacggaaaccgttttctatcatatcgtaccgtacctgccccggccggcccattcatagctgtgggcccagaggcccaacgctcatctaatgcatgggatgagagcctgcaaacttagcgctgacttctaaaaagtctttcaggcacattacatgctgataatgaccgattatgttgatggatcgggaggttggaaggattttagattcatcagagagtagggtttttcgggcatgtggatgtgctctgtcggtgtagtgtttatatggatgccactgtctgcaacatttatgggccttcaagtggtggcagctggccaatgctgtgaccatattaaaggcccagcacggccctgcaatggtactctaccagtgcaggtacgggtatagagcgtgtagattgtacgtccaccgatgtgacaggccacatcacatggctgctagctgtgtataaatgagttcatatacccatgttttaattcacccttccactgctacccctttcttattacccatctttgtatgtccctgcaactttgcctagtattttatttgtcattctaaatatttcaataccttctatatcattaggatgcagtttttcacccttcaaacaggagtgttagtgatatagaaaggattgcgacatacaatcttattttacttttctataccagttttgatggcatggaagaacatacatctatcccaggaaggtagatcagatgtgacatgccttccttgtacatgcatgtacttgcgtgtgagcgccatgactatcaaatgtgtggcaaagtaagcagtagcagtaggaggctaggagcttataatttatacttccttcgtttctttttaattgtcgctggatagttcaattttgcactatccagcgacaactaaaatgaaacggagagaatatataaacaatcaaagaaagtaagtcaggctaaggaagaaattaaataggcctgaagcatgtttagttattactacatctagctagcagcatatgactatataaatatattgcacgcaaatcatatgtagctaagctagtgatggacaggagtagtacgcatgctgtatctatgcatgcacgcacgcaccttgagctcgtcggccggcttgtagcatgcgaagtcgatgaggtacacgggcctgggcctggacatgatgtagacggagatggtgaaggcgaggacggcgaggaaggcgagcacggtggcgaggtcgtaggtggcctccccccacaccttgcgccacagctcgtcgcggctgaggctgcccagctcggcgccgcacaccagcacgatgacggggatggtggccaggtacacgccgtggctgatgaggtagtggtacccgaggcgcacgtacttgaggttcaccgactgcaggaagtccggcaggcggcggcgcacgcgcaccgagaaggccggcgagccggcgtccgggcccgacggctccacgccgcggttcacgatctccgtcgacagcagcgcctgctcctcccgcgccatgatggccgagcgatcgatcgatctatcgaccgaccgaagctagctcgcgcgcgctgctgctgcagctggtatggatccggggcagtggtggtggtagtgagaggtgaggggagtggaaagggtccagctagtattattgatatatagcagtactgctagcaggagaagaggagcgtgcagctgggtaggggaggagatggcgggtgggtgggcggcagttaatgccattagagagcagggcagatgggcagggacggactgatctgatcatctgatggagggggggaagcgggaggcgggagctcccgcccggctgctgctattgttgccacagtcccaaactcccaatcccacccaggcacccacgcagacaggaaatgacagccgcagctgctgctggctggaccgctcgtcttcatgcctttgccttcctccatgcatgtagagtatctttattttatgtgggactgacatgttgtccccgatgaacggcaataggttttttttgcatgttcgccgactgtctgatcaaggtacgtactgatatgcatgtggccatgtgggtttaggatttaatccgaaacgaattgttttttatctataaattgcagttacatattccaacaattgattttaatacgaaccgagtgattgccaggcacacgcatccaaccccaggcggacgactggcattgctgcctgggccgagcaacgttttgcggccatcaactaaaacaagtcttagactatatacaacagcttacacatatatacttatattcaaacaccactctacgaactatacagtctacagtacaaaataatgtaatacagtgcttatatggataaactttggttgagctgctggagtcggccttaactgcatggtcttccactctttgttgtgtgtgaacgtgcagggccgatatcaaggggctggtggctccagaccccatacatccataaaactctatttgataaagaggtagaggttagaagataaggaacggggaaaaataatacagagaaataagcacccattctattagagaaaaatgacaagaaaggagaagggagaaaaatgagccttcctaccggcttgtgttgcctccatcactaatgactaatgtttttttttgaaatataggattggtaaaatataggaatagaaaaaatgtaggactgtcctaaaataaatgcatctaagattacttaactctatttattatttttcattttctctatttttaaagtcacaacaagaatccaaaaaaaaacctgctggcaacggtaactaagctgacgagagttatttaatcttcgtcgtctgacatcctatctgaattcctattgtcagtgtaatgattgtctcaaaacaacttttatactataaattctaaccttgttttttttaaaaaaaaatctagaggtgcattaattacttgttggagaacatacttgttgtcattttattgtctcttgttttttcaaatactatacagtatgaagacagtctcgcccaactttgcatgttgtatccctctatccccagatcgtatactatgcttggagataatcagaagccccaaaccacaagtgcacatccgcgtggacataggatgtatttagttaaacgtacaggaagggatcgaagtagtgaccatattttctatgatgtttagatgagaatcgcgcggggagcaagataaataccgaagcaattttttttagcgacgtgattaaaaaatcgagtgtctccaccttagaccttaaatcaaacacngcgaggggggtaaatgccggtggagacgagacggtgcttgcaacagcgcatcatgctgcctctagcgcctgcacctaacctctcgagggtgaaatgaattggccctgtctgtctgctagtctcagccacagctgctgcccacctc

SEQ ID NO: 5247 - DNA, 2380 bp, Zea mays
ccgggacacgtgactggtggactagacaggaaaatcccaagttacgacgacttccccgagacgacggcgtaacaaggggggaaaaaaggaaaggggatcgccatggcagcgtcgccgcagcagcaaggccagggcggccctggcagcggcgggtggactcccgagcagttctggtcgctgctggacaaggcggaccgccggttcgcccgggtgcgagacctgccctccttcggccgccaggagcccgacgagttcgccaaggccttccgcgcctacacccagctctggcggatgcagcaggagcaccgtcaccgtcttctcgacgcgggcctccgccgctggcaggtcggcgagatcgccgcccgcatcgcccacctctactacgcccagtaccagcgcaccgccgacaccgcgcttctctccgaggcgttcgtcttctaccacgccgtcctcgaccgcgcctacttccaggacgccgaccaccacctcgcccccgccaaacacctccgcttcctcgccaggttcctcctcgtcgcactcctgctcggcaggcgttcgcacaccgtcccgcgtctcgcctcggacatacgcacgctcttagatgactccaaaaagtccttccaggatgccgaatacaaggagtggaagcatgtcgtgcaagagatcgcgaggttcctgcgagctgactcaccatttatgaacatgaggccgctcaggtacagctatgcattcgatccgcccccggacacgcttcgtactgtgccaactactgtcaagaagcgaggtctcgtcttaagtgacaccatactttgcagctactatcctaacgaggtcaaatttacagacctctccatagatgtattcagaatggttcagtgcctcgaatgggaaccatgtggttcatttgcgctaaacgatggttacagcgcccatgatgaaagtggacaaaatcaacccaatctattgaaagatttaagagatgctgcactgcccccgaatccacttaagacaattctctatcgcccttcggtaacacatttcctaacggtcctttccacaaaatgcgaggagcttccttcaaatggtatcatgttaatatatctttcagctacaggggagatgggaacttctggattttgtcctgatactggtgaaaatgttttgagcaactttaataagtttgacatatccagtcttagtcatactagttcaaaggaaaacaaagaaccttgtctatggttaggctgccgtgaaactgaaggttcaaattgcatataccctggtgatctaatcccatttacaagaagacctctatttttggtgattgacagtagcaccagctatgcattcaagtctattcatggtactgaaaggggggagacttctgccatgctactttcaccaagttcccgatcttccgctgcgggattcagtggcgattctactcggcacagtggtagccaatttactatgttcctcacatctccattgcaagctttctgccttctgcttggcaacaatgggacagatattgacagggatgcatataacaaagctgaggagttattattattgtccctaaatgaatgggctgcgactttagttgcatcatcttcacttcattctatttgggttgaagttttaggcgacccgctcctaagaaggttacttctcaggttcatcttctgccgagcaactcattccctgttcaaaccaacaaaccataagacagagttccttccgacctgcatgcctcctttgcctgagtctgttgatgcagagagcatgctctcccaaagctgtgtgctgcgagtcgcatcattctttggcgctgccagtcagttctcatttgctgaggttaccacatggcctgatgttgactctgaggaggctgttgtcaccagttcatctggcagtgccaacaaaggtgtgcctgagacagccagagattcagacatttcaaactcatcatcatctttttgatgcgaccatggcgctaccttcgtccgcttgtgttatttactcatctgcatatgcggatccatttgtaattactggtgctcctttatgcttgatttacacatcatgcagaactgccttgcctttttgtttcctggttacttactgaattaatagtcactagaacatttttttatcccttagtttggaggtgtggaggagctgtgtgagaaagtgtggttgaagagtgttgtttcgttactgtccatggctcggtagaatgtattccctcggtcatttcggtttttctatgtatgttttctataaaaaaaaaaaaaaaatagattagatacataataaaagttatatatgtaaaacagacaaaatggcatctaatttagaacggaaggaatattatgca

SEQ ID NO: 5248 - DNA, 2414 bp, Zea mays
  misc_feature (47)..(47): n is a, c, g, or t
gtccagtctgtgaactctgctgcgtcggaagcccagactgcgggtgnggttagagtgttaggcctgttaaggctagacccatgtggcccacgtaaaacactatatagctgacatgttgggttaaccctaatctattgaataatcactttaacagaacggagggaatacttcccggcaaaacaaaatgcagagtacaccaaataataaaagctgtcatattgtggcaaaggcagcttggacagacgacacatgcaaattaggataggatacacccttgtcttgccacgggatagaaaatgcaagttaaaccatgacaaaatgaattcacaaacattcacattttgatctatccttttatgtcatacccataatatctcaagaaactaacaccatatatctcatagatatggcagatagtaacatcatcacaccattatcactaacaacggcagcagatgcatataacagtgagagagaaaaaaatgaaaaatattcataatttaacagctataccatacttctaccctgtctaaactccatacagctgcacaaaactgtacactcgcaaatctaaaggggcattaagtgtttatgcctggcttctccggcaggaattgcttcatctcctgatctgctctcccaccgacaacactagggagcccaagagagagagacaggggttcatcatctacaatatctgaaccagaaagattacgcttcgttgccaccatggatagggaaagtgagcataaaatggaggagccctcatctgccttcgatgatgccttatttaagctagtactaggttctggggaatcttcgtcgtcagatgaaagaacgtggatgaaatgatcaggtaaaggttttttaagagaggcaggatctgaagggccccgatgacaatgctgtaaaacatcgcatggattatcctgtccagccggtaagggatgtatcttggacaagcatttcataggtgtcattgcatctccaaaaatgcaagagtgtttcccataagtcttctgccttttgttggtgatgtcaaaatccaaaggacccatatctgaatttggagttgatttggtttgatcatcacatatctttgatccactcaaatgacagtgcgagggcaaaagaccatgtttattaagttctatctcatgtgagattgatctagttgcacctagttgctgcgaaaaacggaacagagtttcattctgatctgttttctccattttgttgccacctggtgttcctgtgctacctgaaatgaaaatataatgattaaacaataagcaaggataaatccagaattgatctgtagctttatcctacggaaagatgccaccacctttagcagcagccagataatcctgaatcatgtcatgacctcctgttgagattgtgggaagattagttccacaggaagcaacagaaggatgccccggtataatttgtcttgtgcctgcagtttcttcatgatgtatttcacttgcattcagacttctatcctcacgtttggactctaatacaatattacgatctaaagatgcaccagacttctcactctctgatccaagtgaaagagacagatcagatatataatcattagggcactcattcaaatctatacccaaaggctgatgtgccttaggcgaaccaatatcatgctggataacaggttcattgatttgttctaatggacaattatttgtaggaagctctagtggactacttgctttccgggcataaaaaatgccccaaaagaaaggtaaaccattccaacctgtaaaatgtcataaagaatccattaaaaggaggcaacgagcaaatcctgccacgagacagcaacattagcaaagataaacttacgttgaatcctctctggcaatttatcggatgggaaaatgagaagttcagtgccaccaatatttgctttaagagacaaatcaccaagaagcatgttatccaagagttttccatatgccctttcataactgttcaaggagacatgagacctcagctagtgtacagaggattgaaactcatgaaacagtgaaatggcgaagaaagtaatacctttcaacatctttagcaaagaaaaaaagagcaatattatcttcagttggatttacttcattaaattgcagtggccttgaggaatgccgtgggacttctgctagctgaattttgtcaggtaattgttcacctaccttccacgtactttggatgaggcgcaagtagacaagtaagcttgaaacccatcgaacatttcaggggagtttccatgtcctgaaacctcaaacccaccctgccagatgtaagactgcggacgcgtgggctgaaataaaaggaattcacagttaaaactcttaactagtaaatggaagtaaagggagaagaggagggtcgtactg

SEQ ID NO: 5249 - DNA, 2841 bp, Zea mays
gcagcggcatatttcctccaggccaggcagccccaccgggcaccgggccaccacaccacgtgacatccgtttcgtacggcctcccccaaaaatctcaccgtctctctctcctaacgaagaggagagggggcagaagaaaacctcgcgcgggggaggcgcgagaggaatcgcgggggccggaggagcagcggccggtggaggtggcgcgcgcggtggccgtccgagatggagtacatatcccctgagagaaatctggaggggacttgtggagatcctgggccgttatttgccgaccaaggtggcagcttgttggaccacttgggttatcaagggggaggaattccacaacatgagtctccaacactggatcatggacttttggttgatccagctggtgcaattccgtatttatctacagattctccgcccttcatgaatgatcaaatcacttgcaatgttataaaatctgcttcagctagtccagaatcttgtacaaaacaacctcaagaacctcttaatgtagaatctgatgtacagaatgacgcagctgaacaaaatgttcacaatagtaactctgaagaacagatcacttctctgggctgtgatgtacagcagaacacagaagtaattgatgaactgttgcctccaaagcttcctgaaagcagtggtaatgatatatcaaactttcaaccggaaactacatattctgatgcctaccatggtgactctttgttaactgaaaatagttgtaatagttatcagcttaacaatagtggtgctcctgctgctgatattccaaactctcctgcacttcagatggaaaatgaggagatgggaaagttacatgagacttctcacaatgaaaacagtgggtcagaggatgatcaaatgaatggtaggaagccttgccccattagtggtcgagacaatgagaagtttaacacttcagctgtacctccctcttgggaacagacaaaacaaaaaaatcctggtaccagaaatggaagttcaactccagacgatcaatttgattctcctccagacaggtttgcaagattggaaagggacacaccatctccagatgggagagtatcccctgaaaggtttgcaagactggaaagggataccccacctccagacggggatatatctcgtccaggtgaaagttcacatgtccattctgagacgatggagatggagccagaatatcgcgccaatgatgataccccacctccagacgggaggatgtctcctccagttgaaagttcacatgtccattctaagaagatggagtcacaacaccgtgccaaagatgttggtgagttagctcgttttgaaagcccacaggtaagacatcggtcccgatcttctgaaaaacatgaccccagccgcaaaagaacctcttcaggggagttgtctccacatgcgcgtcagaattctcctgtagaaaggaaaagacggagagagtctcgacatggtgatgggtcacctcgacagagatctgcatctccccgaagaagatctacaccccctcgaagaagatctatatcccctcgaagatcctcacacaagaggagggaatcaccaagaaggggagactcacctaggaggaggcactcacctaggaggagggagtcaccaaggaagagagactcaccaaggaggagagactcaccaaggaggagggattcaccaaagaggaggagggactccccaaggaggagggataggtcaaaatcaaggtcaccttcaagaaaacatgacacttctagacataaaaaagaacatgacagatctcggtccaggtctccccactcaagggatcatcacagacgatctccaaggcattcaccaagacgcagatcacccccagccagtcatcgccatcattcaccaagaagacattggtcaccacctgccaacaggaagactggattgggtaagcctggaaagaatctctttattgcaggatttagctatgccaccactgagcgagatttggagaagaaattttgcaagtttggacgtgtaacaagtgcacgtgttgttcgtgataaacgaactggagattcccgtggctttggattcttatccttggataaggatgaggatgctgatgcagcaatccgtgcttgtgacgagactgagtggaatggaaggatcattcttgtggagaagtcaaaagcacctgcatggtgaatcttccgctttgggggcgcacacgccattgttcgagagggatttcattgcttcacctttcacagattttaccattcagaaaaaaagaaactaccggtatgacatactcggtacatgtcaaagttcacccgaacctggcttttgatgctgtactaggagtaagagtattaaataatgcacttccttgctgatagttgttgaaagaataagatgtaacgttgcaccttagcttgtttcagggccctgctgctgataagagggacttacgacttagtggtacttttagtgtctgcaacctctacacgtgaaatgtgatacgtgcctgttcgtgagctgtcagttctcttcttcaccttcatctcgcgcccactgaatactgatggcatgaacggattccgggagactcaagctttatggtgttgttgcgactcaagggttatgttagcagttcaataatctgcatattagcttttcaatgttgtgcatcctctgaatgagggtttggaaaatgtcctatatagtttgtgttttggattccagatgttgtttaattatggtcacgacacgatacctatgccccatctgttgactgttggtgatgttttttttcctgatgacatgtcttttcatcctgtgttcttg

SEQ ID NO: 5250 - DNA, 2414 bp, Zea mays
cctcgagccggccgggaatatattaggggtccctcgagtccctcgcggccggccgttcctgtaccctgcacctgccttttactccattcccctcggtgcgccgccgccagtccgccccgccccgccccgcccagcagacagcgcagccatgccgctccacctccacctgctgtcgtccccggccaccgctgccaagctcgcggcaggtctgcgcgcggcgcctctccgccggtgccacagcttggccccggcgccgcgccacacggatcgcgtggcccttgcgtcgtccctctcggcggtggcgcggtctgctggccccgccgtggcagcggcgcagaccaagcccagcgtttcaggaaagaaacaagtattgatatcgttgtcggataaaacggacttggcttatcttggcaatggtcttcagggtttggggtattccatcgtttccactggtggaacagcatccagcctggaagcagcaggagtcagtgtaacaaaagttgaagaaatcacacatttccctgaaatgcttgatggacgagtgaaaacattgcacccaagtatacatggtggtattcttgccaggagagaccaggagcatcatttgaaggcactaaaagatcatggaattgggacatttgatgtggttgtggtgaatttgtatcccttttatgacaaagtcacctctggtaacatctcttttgaggatggcattgaaaatattgatattggtgggcccacgatgatcagagctgcagccaagaaccataaggatgttcttattgtggtggatcataatgattatcctgctttactggagtaccttaaaggaaagcgagacgatcagcagttccccaggatgttggcatggaaagccatgcagcatgtcgcctcttatgattctgcagtgtcagaatggttgtggaagcaatcaaataaaggagagatgttccccccaagctttactgtgccactggagctgaagtctacactccggtatggcgaaaatcctcatcagagtgctgcattctatgctgacaagagcctttctcttgtcggtgctggtggtattgccactgctattcaacaccatggaaaggaaatgtcttacaacaactacttggatgcggatgctgcatggaactgtgtatcggagtttgatagtcctacttgtgttgtggtgaagcacacaaatccatgtggtgttgcctcacgaaaggatattcttgaagcttacaggttagctgtaaggggagatgctgtcagtgcatttggtgggatagttgcattcaacacgactattgacgaggatcttgcgaaggaaattcgtgagttcaggagtcctacagatggtgagacgcggatgttctatgagatagtggttgctcccggctatacggagaagggtcttgaggttctcagaggcaagtccaaggcactgaggatactcgaggcgaagagaagtggaaaagggatgctttcacttaggcaggtgagtggtgggtggttagctcaggagtctgatgatctaacccctgaagagatcacctttaccacaaagtctgagaggtctccgcaagaaaacgagcttgccgatgccaaatttgcctggctttgcgcaaaacatgtcaagagcaacgcaattgtgatagccaagaacaactgcatgctgggaatgggcagtggtcagccgaacaggcgagagagcgttcgaatcgccttcaggaaggcaggagaggaggccaagggagccgcattggccagcgacgccttctttccctttgcctggaatgatgccgtcgaggaggcgtgccagaacggcatcggcatcatcgcccagccaggaggcagtaagaaggacgaggacgccgtcgcgtgctgcaacaagtatggtgtgtcgctcgtcctcaccggcgtcaggcacttcaagcattagccgtcatgccccatggctggtcatcttagcttagggagttacggaaaaaaaaacaagcttcgaaggctgcagcttgtggagctgccctgatgtttagctttctgcaaagtgcaaaactgcaaattttggtttctgtagggcgtaggctttggtgggtgagctcgtggggaaggtaatgtttctcctggagtcgaataagctgatgggtgtaccgcgagtgacaattgaacccaacctaaggacttgcaggttggtacttttatctgtcaaaatcagccgtgcgcctatgcaccaggagaatcatcgatgtgacctacaatcttcggactacaaaccattgaaaaataaaaagagaaaaggtgcctgggaatttctgtgttcacaaatatatgagcgtttgcagttctgcattatgctgcctggtctagtgcgtggtaagccggccccaaggaggatcctgtcggtagcaatctctgca

SEQ ID NO: 5251 - DNA, 1634 bp, Zea mays
cgcttcaactggacttgtgtatatacagcatacatcggaagatccgcggctaatttctcaggtctcaatcaagcgataggagcgtggtttcgcgtcgagtgctcactcatctcaagcgtcaccgtcgaccgtggagcaccaaatcaacccgtgagacggggcagattagattcttcccatccaaggggcggtcgcaatgatgacagatgataaaggcgaggttcgcgtcgtcagtattaacgataaaaaaaacaccggcgcatcagaatgtccaaagtaaaactactactccttttttcattatttatcttcctaagactgccccggttggaccgaaccaaaccaaaccaccacctcgtatcgtctgtgcccaccgtgctagaataatagtatcgcactgcacgatgactatttccttttactttaagttacaaaaccattggatttcttacattacaaattaatttagttctaaataaaaataaatcatttttgatttatgatttattcgattagagatggtgtaattaatttagttctaaataaaaataaatcatttttgatttaggatttattcgattagagatggatgaaatgagatagaagtggattaaatcttcttctatttaaaatagaaggagatttaacctcctcatatcccaccctgttcgaaggagcccaagcccaaggggcgcacgcgcacgtgggttgagacgagtgatcactggccacatccggacccaaaaatatcacggggtcgggggaggcccattgggtacccaccggcccggggggaagcagagggagagcagtcaccaaaccaaaaccgctctcgagtctccatccattctctccgctcatccgcagctctcgagtctccagctctagctagccttagcctcgtccaagggacgaaggggccaccatgagcgtggtgatcctggacggctccacggtgcgcggcttcgtggcggacgaggcggccttcgcgcgcagcctggacgcgcggttcgccgcgctggacgccaacggcgacggcgtgctgtcccgcgccgagctccggcgcgcgctcgagtccttccgcctcctcgacggcggcggcttcgggtccgcccagccggcgccgctccccgccgaggtcgccgcgctctacgacgccgtcttcgagcagttcgacgccgaccacagcggcgccgtcgaccgcgccgagttccacgacgagatgcgccgcatcatgctcgccgtcgccgacgggctcggctcccagccgctccaggtcgccgtggacgacgagggcgggagcttcctgctcgaggcagccgagcacgaggccgctgggatcgccgccaagatcgaagccaaccgcaaggcggaggcggaggcggaggcggccaagtgacgacgtgtccctcgtgcgggccctgcgcttgattttctgggtgtttgctactacgtactagtactacttacctggcggccgatgtgccgccgcacgtgtacggtatactacgtaactagaagcggccagcaccagctactcaaatcactgctgatgctacttgtgaacggaataaaacctgtcaatcattttagtggtcttgcttgcataaaacacctcgacctcctccgggctt

SEQ ID NO: 5252 - DNA, 2199 bp, Zea mays
gggtacctcgaggccggccgggcccgtgttggcctggcagcacgacctcatcacggcacggcgtccttaagctcatcggccgccccgcccccgcctgcgacccgcgatctccgcgaccgcaagcagctcggcaggcaggcctccaccgctccaccacctccactcggtctacgtgctccgtcaccaaacccacccgggccaacgccgaagcaaccccccctccgtcctccccagatccggcgccgcctccgccctcacttacactagcacgcacggcggacacgtcgcctcccccgcgcgatctgatgcaggcgcacgcggtggccagcggcgatgcggtggaagcttaactcctccgtctacaagcgcgtgccgtccagggaaaccgccatggaacccgacgtcgagacgccaatgagaatgacggacggcggcggcagcggcgcggggccgtcgtggcgcatgtcgttgccgcatgtctgtgtcgccacgctcacctcgttcctctttggataccactccggggtggtgaacgagcccttggaggtcatctccgctgaccttggcttcgccggcaacactcttgctgaagggctcgtggtgagtatctgtttgggaggagcttttgttgggtgcctcttcagcggctccatcgcagatggtattgggcgacgccgtgcgttccagctcagtgcgctgcctatgattattggtgctgccataagtgctctctccaatagtttggagggtatgctccttggaagatttttggtaggaacagggatgggattgggtccaccagtagcttcactttatataacggaggtttctccttctacagtgaggggtacatatggtagctttgttcagattgcaacctgccttggaattatagtatcactactcattggtacacctgtcaaagatattgatagatggtggagagtgtgtttctgggttgccgttatcccagcaactttacaagctctcggtatggagttttgtgctgagagccctcagtggctttataagtgtggaaaaataagtgaagcagagatgcaatttgaaaagcttttaggtccccttcatgtaaaatctgccatggcagaactttctagatatgaaagagtagatgatggagaaagtgtcaagtactcagagttgttctatggtcgccacttcaatgttgtttttattggcacaacgctctttgctttacaacagttatccggcataaattctgtgttctatttctcatcaactgtattcagaagtgtgggggtgccctctaaccttgccaacatatgcatggggatttctaatctatcaggatcaattgtagcaatgcttctaatggacaagctaggtagaaaagtgcttctttcagggagttttcttgggatggcttttgcaatggggcttcaggctgttggagcaaaccgtcagtatcttggttctgcatgtgtatatctttcagttggtggcattctgttgtttgtcttgtcattttcactaggagcaggccctgtcccaggacttcttttgcctgagattttccctaataaaatccgagctaaggctatggctctctgcatgtctgtacattggatcgtgaacttctttgttagtttgatgttcttgcgtcttctggagcaacttggtccacagcttctctacacaatattttcgtcagtctgtgtggtagcctcaatatttgtgaggcgccatgtgttggagacgaagggaaagactttacaagagatagaggtttcactcctgcaaccacaataaaggtacatatttgacgtggctggaaccttgggcaggctgtttgctgaacagaaacaagctggccctgcagaagctgattcctgaagtcatcggcaacgccctacaaatggtctcagggaagttccagatatgcgcctgcgacagctagggcggtgtttccatagagcatcatgtactgaagttatgcctgtatcgcccgccctagataggatattttcatacttgtgttgtcatctgttctatctatgagtcgtaatatcagaaaaaaaaggtactactgttttaccgttgatgagcacagttgaaaaaaggaactatcatcttcattttacatgtatgtactcagtaaccatactccgaataataacactgcatggagattccttgttagtaaaaaaaaaaaaaaaa

SEQ ID NO: 5253 - DNA, 4774 bp, Zea mays
  misc_feature (2923)..(2923): n is a, c, g, or t
gcctgcagagctgcgctgactcctggagatccatacatgccattgccaaacgaggagatcattagtaaggttcaaaagcaggtaggtttgtaaatagcttctgtttcggtcaaatttctgctgttccctttacacatagctgagcaagaccccatttcaatgcacttaaaaagagagagatttcttctgcttatgttattttgtattcttccaaagctcacctcagtaataaacacatgtaattttcccacaggttgtagaactgttcccatcttcccggggcttggaagttacatggtccagtgtggtaaagatcggacaatcgctgtaccgtgaggctcctggaaacgacccattcaggcctgatcagaagacgcccgttaaaaacttcttcctctctggatcttacacgaaacaggtattgttgtacatcaaaaacatcgacctagctacagccatcaacaggcccagaaaactaatgtctgaatgccttgagtttgttttaaccaatggctcagaaaaccatcagaaacaaccatttcaatttcatttcaatttcatggcgtctgaacaccttggaatgttttttttcctcctatcttgcaacatgcaaacatcggtaggacatggtacattggtcttatttgtgctgtacacgaaacaggactacattgacagcatggaaggagcaactctctccggcaggcgaacgtcggcctacatctgcggtgccggggaggagctgctggccctccgaaagaagctactcatcgacgacggcgagaaggcgctggggaacgttcaagtcctgcaggctagctgaacaacccctcctgcactgcagagaagcttggatctttccaaccacacatacatgctggaatggacaaaccaaccaaccattggcttttctcgcttcagggtgctggcgattcccgcagcgacctcctgtgtatcgtatccaatttgagcattagatctgccccccctgcaggcgtttctttcctatccctgatccgagaagcagggtgtagtctaggtggctggcatacgggattacatcaggcagtgtgtaagttcagctggaactcgattggtaattgggatggatgattgatgatatatatatagcacacactgttcttgcgtcttgcaagaaaatatagcaagcgatgatccggcgacacttgctgggagactgtaccaacgatcttacttcattttggccattgtgttttttttttttttacaaaatagcagcatcctgtatcaactcgagctctcgtgctaaaccttttcgtttcatatgaaaaatatttcgttatcgttaggcttaggccatgcgcatttgagctatggtttatggaaagcttgccggccttgacgctggaaggagaaaccagtcagtctccggcgctgcccctcccgccgtggccggcgacgggtggaggcagtatgtggagcgagagacagtgggcagccggagccggcgtgtccctctgaaggcctcacgacctgccggcttgtgatggccacgagcgcgtgcgcgtgagcgtcagcgtccgacctccagtggtccgtgtttccccgagcaagagcgaacagcagtttggcggcggctgatggcaccaagcgcagccgccggaccgccgtccctggcccggccatcgacatcgagtagcagccacctgcggcgcgccggcagcgccctccagcccgtctccgtcccgcgcgccttggtgcaggggcggaggcgcctcacgggcgccgtccgagccgcgccggacgcgccgccggtggtcagggctgccgtcagcgccgtcaccgagctcctcagagccctctccccgaacaaggcgctcaggtaactaacccagcatctcacactcgtcaaccccatcagtcatccatccgctctggaatatggatccccgtggcgttctgtgctcttgcggtcggctgtgcaggggcgctgctacccagcagcagcagggcgaggagccggatccggacccgacctgcggcagcgtcgaggacgtgctcgccgtgctccgagacgattaccggcgcgcctacttcctcaccggtacgggctccttgcacctcgctgcgttcttgcgtcagtgatgttcgggtcacgctcgtggcgctggcgcttgctagacactgtggtggacaggtggagctactgcctaaacctgacaccggccgaaccgcgacggcgacgttgatgcatgcgcgcgcgcgcgcgcactcagcaatcagcatggcatggatcgttcaaaggacatttttttttaccaaggaaatggtgtgggattgcaggggatttcactccgggaatatacaccgaagactgcttgttcgaggacccgacgatcaagttccgcggtacgtaatttaaaacatctcttttgttgatgaacatttgttagcctgtactgtctgagagaagaagaagaaggaaaaaaaaaaaccgagctgtgacaatgagtgcgtgcgtgcgttcttgctcctcgcacaggactctccaggtactcccagaacctgggtctgctggtgcccttcttcgacagcccttcgctcgagctagagaacattgagaaggtaggaactagtcgaccggcggcgattcgttcgcagtgacatgacatcagtttctgactggaaaatgcgcgtccatatgaccatatcagggttcgagggccgaaacgaagttcgtcaaggcgacatggaaactaaggttcatcttcaagctccaaaaggcacacgtaatttttttttcttcctcctccctacactacacagcagtgtttctgaacggaacaggactgaccgtcgtttcaggacgtatctgaggcttccatggaggccgctggtcgcgatcggagggagcacgacgtatgatctggatggagatttnaaggtagccgtccgggaaatctccaaactgtgggagtttttttttgtatgtacgtttgatgcggatttgaaatgttcttatgtttggatcgatcgtgtttgttcaggttactcggcactccgagagctgggacgtctctgcgcttcaggccatcgctcagatcttcgtctcggccccggaggagaagctggaaggcagctgaggctgaggcagagcatgcaatgtacagcgccacgcagacgcaggatcagtgatctgaatccgtgatgagcaggtgtccaaagccgtctgtcagagctccgctggtcttctctgtgcaaacaaactgtaccctctctgttccaggttataaacattcgaataattttgctacttacctagatatatgttacgtatatagatatatagtaaagggcggttattatgacacaaatttgtagggtgtaggtacaggttttgaatttgacatttgatgaacactatataaaaaccgactctcctatattccaaacgaacatcctcttttgaatcagatagacccatcggacccatccttctcgccacgagccacactcttctgtgcttaccaaaatgggctggccggttcctggacctggcccgtcttgtgccgatcctcctgaagcttctccggcattttccgtccctaaaatcccctaacctacttgtactggaaactaccctattattactatattcttttcccatcatcaaatcacagtccaacattggtacatccaattatagataaaaaaaaggcggtactgcatggggcctgcggtatttattaattaaatgtgtatttgctgattttacatgagacgatatgtacaggctgcattacagagtgtttattcattgtctgacctcctccgctatttcttgctttattttgaagcagataagaagtatctcttttttaaacaatgtcagccacccttgtactgtagatggcacgtttttaaatattccattcatttctacacttccagatgcaccacatcatgaccatcactgtttccactttctattttttttgtcaagttattgtacagtggatcttatcatagtgtgaatgtccgatgctctcggcagtgtaaatctaattgtctgcagtctaccagcatcttcttgtgaagttgcacttgaggaagaggtggataattgtttcttctttttgcaagatataatttcacatgtgtacgagtccatctccataatttttcttctaagcattgcccttgtgttgagacgattgtgtagaagcaaccaaaacaacaccttctgcttgggttgacattttgatttccactgcaaggtgaacgttacggtgcaagtggtgcttttgttatatgtttgtaaactttctgagacgaatatcttggagtgtcccatatatttgaataggtaacccataaaattatgcataccataaatgtaaactttattatatgtgttgtttcggatcaaactgagtatgcaaagggagaagtccacttgccttgcttatagaagagtcgagattcttccatggaatagattctgattctcaactactggatcaatttctaaacatcacaaaaataaataggaagaaacaaacaccactcaataacatacaacattcaccatagattaaactaaaaagaaaatataacgaaaagagcatctgttgttcaaacatcacaaacaatgattataacaaaaaaggtgcgcttttgtaaaaaggtttggtttatattttataatactagacataaacatgaaaataccttagttagaaatatataaacatcaggtgaaccatattaatcttttataaaagcacatata

SEQ ID NO: 5254 - DNA, 1595 bp, Zea mays
tacctcgaggccggccgggattcgtcttctatgagaagtcagagccagctcccaacaacaaacctcatgggtatacatgcacagatgccttcgtctggaatgggtctgacctcacctagatatccttctaggatgtacccagacaacagattatatgggcagtatggtcagtatgggaacacactgaagggtggccttggttttggatcaaacatgtatagctcgagaaacaatgggaggtggggagttgtggataccaaatacaagcccagagggcgtgcaccttttggttttagtggtgagaaccaagatggctttaccgagctgaacagaggaccaaggtctggtggtttcaagcaccaaaaacaattcggtcctactgtaactattgctgtgaagggccaagccctcccttcagtggggaaacagaacagtactcttccagacaaaggccaatttaaccaggaagggtttcctttaacctacaaggatgcaaagttctttgttatcaaatcatatagtgaggatgatgtgcacaagagtataaaatacaatgtgtgggctagcactcctaatggaaataagaagctggatgctgggtaccgagaggctcaggagaaatccagtgactgcccggtgttcttgtttttctctgtgaacacaagtggtcagtttgttggtgttgctgaaatggttggtcctgtcgactttgataagactgtggagtattggcaacaagacaagtggaatggttgttttccactcaagtggcacatagtcaaggatgtgcccaacaacactttgaagcatattacactggataacaatgataataagcctgtgacaaacagccgtgacacacaagaggttaagctggaacaaggtcttgaaatgttgaagattttcaaagaacatgttactaaaacgtcaattttggatgattttggtttttacgagaatcgccaaaagttgatgcaggaaaagagggcgaatcagcaactgcttcaaggccaggggggcgatgtttctcaagagaaagacaaggatgcgactaatggcaaaccagggtcacagaaacaggcaacgagcaaggaaggcactcctgctgaggtggcggcggatgcctccaaaccagtagctgaaagtggaatatcaaatgacaactaagcatcatgcatactggtcggcaccataccggtgcaaatgctgcaggttttgcggtatctgcaaatcaaaacctattgattctgcctgaattatggacttctttcggtactggagttcgtgagatggggctcatcatgggagtgaatcagattttacttattgtcgctttgctagttgtgtgactggtttttggtgtcttggaacccgtgttaggcttcttacatacccctgtgacgacaccgagtttgttgtaacccttgttttttttgcctttttgttttagttctatcattgttaacgaagcagcctatttcctatactttgaacaacattaaggtagttttttttgcatgttgcggtactgtggagagtaataagacaaaaagactctaggtttaaaccaaaaaaaaaaaaaaaggcggccgctc

SEQ ID NO: 5255 - DNA, 800 bp, Zea mays
gcaccagtcaacatcagaggggtaaaaggcaaaggccaagctctctaatggagcgccggctgctcgccccccccgtctcaatgcgtgataagcgaaacgctgcgcgtggccaacctgatcagcggggtgttcaggcgtgcgaacaccgacatccacttcaaaggctacgtgatcccaaagggctgcaagatcttcgcgtcgttccgagccgtgcaccttagcctggaccactacgagaacgcccggaccttcgacccttggagatggcagcagggcaagagcaagctgcagagcgcggaaggggccagtctgttcacgccgttcggcggcgggccgcggctgtgcccgggctacgagctcgcccgggtggtggtttccgtcttcctccaccacctcgtcacgcgctttagctgggaggaagccgaggaggacaggattgtcttcttccccaccacgcggaccctcaagggataccccatcatcctacggcggcgaccggattgcgatgatctctgacctcatggctatgttctccccccttatcttcttcggatcaaggccgaaggctaagcattagatagagtaaggtggatgtcgtggctagtaggtgcatggtggtttctgccactcactcactcactcactctgttgtctgtttgttcctgttcctctctgttttctcttgctctgtaacctggacctggtacgagtcagcagccagcagcaaactcgcgttttgcctgtaaaatctaaaatctgatatgagatgcagatgcccccgcgactgagacggaaaaaaa

SEQ ID NO: 5256 - DNA, 1836 bp, Zea mays
  misc_feature (863)..(863): n is a, c, g, or t
tttgtttctatatattcattaaaaaacagtagagttgttcgcttcatattaaagtcaattgttcgaattattgtagctgctacaattgatagagacaaaacaacgtaaaaacagccgataaagattaaaaacaaatgaacaggctgagctttattctacaaaaactttctcaaacggtctaaattcacaaaccctggattcatcgaaacaatgcatctaagtgccatattcaccatttttgtgccgcgcctcaattgaagtttcatcaaagttgattacacaaatgtgttggtttgttttcttcttcactgaatcactggtggccggcctcgcccctcgcccccaccacggtccacagacagcaatccgcccgaaccatcatcaatatcgcagcgcaataataactcctgtgaatcaccggcagatgcgtgcatcattgtgggctggaactgcactctgctgaaacagaacgctcttggcgaaccttccctctccatagtataatctgttcatctttaaataatataggaatgcatggaaccaaatctcagttttgtaagtggtggcgaattcaatcctctgttcctcaactcttttgtttcctcgaaagtcaacccttcagcaacgttttgcacgagcttaggatagataggagctaacggtttccacagcatcaatggtacgccaggccttttctgggggtcatagttccgaccgcggtacagtataatgatgtttatgctgcgggatacgactttgccgcctgttttatccgtattatgacctcgagatggaagcaaatgttgtccatgtcgagcgttggcactcccagacatttgatcctcacagcctctgcacgtttnccaatggttgtggatgtcatcaagcatattgtgtgttaccccacctttccccaaattgatctgccgtgagcaatcactgtgccggtacctctccaccagcgccgccacctcctcctccgacagaggttccccgagaacctcctcccggctcctctcgtcgccactagcatcatcgccgacgcgtgccgcggctgtgccgtcccatgggcggtcgaggcggccggggccgaagggcgagaaccgggtgggctcgcggaaaccgatgggcctccatgtcgggtctgtctccgagtacgagtaccggaagtcaaagggaaggtcggagtgcgcaggctcatcgggcctgatcttgcccgccagggccttgggcttcggcggcggcgtcgatggcgcccgaggtgggagcttaggaacccgcgtgaacggagggtcgtcgtcgtcggggtcaaaggaggatgaagaggagcgcaggaggcggcctgccagggcctgggcgtcctgagcggggcgccgccatgggagaagcttacgaggaagaagcatctttttgatgagcttattgcaaaaatgagactaccaatatggccgttttcacctttgttcatcaacgttgcactctttcagatatgggactgagacacactcacacacttgccttaagcccttaacgccgctcgtaatctgctggaccggagctggagttcctcatttgcccttggttctctctcgctcgagctctctctctgtcttcgccagcgaccgctcctcctgctcctctgtaggtcacggtcaccccagtccccagccaaggcagccgctcaggcctgttgccctgttgagctgatagtcaaggccactgttctgagaatatgcaactgcttatcgccggatgcctggatggatgaaagctgctgctgcagtagcagccgaacggggctggcggagaacgggacttcaggctggtggagagcgg

SEQ ID NO: 5257 - DNA, 1974 bp, Zea mays
gagaatttgtggaggctagaggacagtggttcagatgactggatggtcgttagtttcgagataaccttcccccagctgctggagatggcaagagacttgggtctcgacgtgccctgcgacgagccatccctgctagctatctatgcaaggagagacgcaaagctcgcaagaatccctaaagaattactgcacgcttcaccgacaactctgcttctgagcatagagggaatgccgggcttagactgggagagactactgaaactccagtgctccgatggttcgttcatgtcatcgcctgcacccacagcctacgctctcatgcagaccggcgacacgaaatgcctcgagttcctcgatggaatcgtcagcaagtttagcgggggagtgccctttacctaccctgtggatctgttcgagcacttatgggtagtggacaggatagagcggctgggcatagggaggcacttcacaggtgaaatcaaggagtgcctagaatacgtacacaggtactggggtgacgaaggcttgcccgccacgagggaccgtccggtctcagaatgtcgatgacacggccaatggggttccgtcttctccgactgcatggctacgatgtctctccttgcatgcatatgcagctgtgtttaagcacttcgagcaggacggggcgttctactgctacccagggcagtcgaacaaatccgtgactgctatgtacaacctctaccgcgcttctcaggtggcctttccaggcgaggatgagctccgacgcgctgaggcatacagccgtgagttcctctgccgcagacgagcctccggggagctcaaagacaagtgggtcatccccaaggacttgcctggcgaggtcgcttacgcactggacgtgccgtggaaagctagcctgccgcgcatcgagacgaggatgtatctggagcagtacggtggtgccgatgacgtgtggattgggaaggtcctgtacaggatgtctctcgtcaacaacgagctcctcctccggacagctcaagccgacttcagaagtttccagagacaatgcaagctcgagtggcatggcctcagaaaatgggccagcaggagaaacctccaagcatacggcgtgacgtcgaacagcacgctgcgatcctacttcttagccgcagccagcatctttgagccagacagagcgacagagcgtctgggatgggctcgcacggcggtgctcgccgaggccgtctcctcctgcctccgagacggtcgttgtagccgtgccgacggcatgctgagggaactgaccagcggcatccacctacgcaacgacgataatccggcagccagcttggtgcatgctctccatgagctcattggcctccttgcattcgacaatgcttcctacaacagccttcttgatgcctggaagcaatggctcgccatgtggaccgcccagggacacgaagggagcgtagcgctgctgctggttcgcacagtggagatatgctccggccggaggcgtagcgcctctgccaccgacgatggccaagcacacagcctctccgagtactcccagctcgagcagctcacgtcctcggtatgcagcaagcttgctgcagcaggcgccggagacggagacgacctttccccggcaagtgtggaggacgcagcagatcgcctccgtgtggatctggagatgcagacgttggctcggtgcgttctccggagccgcagcagtatcgacgcagtgaccaggcagacgtttctccatgtcgcgaggagcttctattacgtcgctcattgctcagctcgaacggttgatgcccacatctccaaggtcttgttcgaggatgtcgtgtagccaccgtttgggcctcgttttgtatctttaaagcagtgtttggttccacccaggtttagttccggtcaaatcaaatgtttgaatgataattatatgtattaaatatagtctaattataaaactaattagat

SEQ ID NO: 5258 - DNA, 3358 bp, Zea mays
  misc_feature (625)..(625): n is a, c, g, or t
ttggctctggattgtcatagaagcaaatcttttgttagtaactctgttcatttaaatggtcgtttagcttgtttaaacatcatgtaaacgctacactgtgttttttccatttagtgtattttatcccttttatttggtagtgtagcccatttaacgatctatttagtttgaataacgactaaaccgataggtgaccgactgtttaccattcagcatttaagaaaatatttgttagtagtgtggtagcttactggtagtttaccaggtaggcgtaaaagggaggctagattatgaagtgtcataatttgggtctcgttagggaggttttgggtctattgtttgtgctatataaggggcatttaccttgcacctagattgaagcatagcgccctagtgtgttgttgcctactagtagcaattgtgataagtgatgaaaccctaccctaggaaggtgtacaccttttcagagtttgattaagctgttatcacaggtgtgcaccctcacatgatcagaatggatctcatttgaagatgatttatgaggttgatgttaacctgctcatgaaatttatttaatggtttaagatcttttacttagtatagtaaacatgttattctaaaaaanccttggcaactaaaaatgctaactgcattagccctatgttagttattacctcttgttatcaaccttgcatattaaattacttatgcacttgttgagtatgacatatacacataacccttgtaatctctaaataaaaaaagggttggatgctagttagatgttgtgtcgtgtcgtagaccttcctatggcttggtggaatcgctctatcgttttcatctgacgcccgtttggatcttggaattgaatttcattctaataatagtaatttatgcatatatcaattaagctaattcagttttatacaaaatatatttgtatactattattaacaagatatcggagatatttatgtgctgtatttttattatagagaagtgatccgaaaagtgtcctataagttgtagattagaaataaattctactgatacataaaataatttcacatcctccatctcatgaatttgagatagtcctatatctgaactttgaaagtagtggaatgttaaattccaagctaaatagtttactttattaagtaaattctaattcctgcaaaatgaatggattcaaacgccccgtgatagtaatgtcgaacactacattttatgtttccaatgaacgttgaggcttctaataatatattgtcacttatttatttcatatattgtattacctctgttcttaaatatattgacattattattattttttttaaaaaaatttgaccactcgtcttattcaacaaaaaaatgtgaaatgttatttattttattataatttgttttatcacttatggtagtctgagtgtgatttaaattttggattttcgaataagacaagaataagacgaatggtcaaagttttttttaaaaagtcaacgacgtcgtatatttaaaaacggagggagtatttggtttatagtaaacatgtttttttgggcatcacaagtttgaactggtgtgtctctgctagttttgtcagcactgctgctgctgggaaggtagggtcgatcgaggtgcagcagcacttgacttgtccgtcccctctccaatcacagttctgtacgtatatccatctcagcaccactcgtttatatatgcacctggggatcaataatcatttgtctcttccataagcgtagacctaccacagggctgggccaaccagtcccgatcgatcagccagcatggcgtcctcctccaaagggtcgctgccatgcgtgctcctcctcctcgctgtcttccaccacggctgctcgtcggcgagggcccacagacgtgccggcgacatggagaggagcatgagcaccgacgacagctcgatgatagagcggttccagcggtggaaggcggcgtacaacaagtcctacgccacggtcgccgaggagcggcggcggttccgggtgtacgcgcgcaacatggcgtacatcgaggccaccaacgccgaggccgaggcggcggggctcacgtacgagctcggcgagacggcctacaccgacctcaccaaccaggagttcatggccatgtacacggcgcccgcgccggcgcagctgcccgcggacgagtcggtgatcaccacgcgcgcggggccggttgacgccgtcgggggcgcgccgggccagctgccggtgtacgtgaacctgtccacctccgcgccggcgagcgtggactggcgagccagcggcgccgtgacgccggtgaagaaccaaggccgatgtggtacgcacaatccgttaccgacaccatcatcattccgcgcgtccttcctggcacctgtcatttgccaccagctgttgctcttgcctgtcccacatgcatgcatgcttgtcactgcgcaaaacgcacatgcttttgtcctggatggacgggtgacgggatcggatcgtgcacgcagggtcatgctgggccttctcgacggtggcggtggtcgaaggcatctaccagatccggacggggaagctggtgtccctgtcggagcaggagctggtggactgcgacacgctggacgacggctgcgacggcggcatcagctaccgcgctctgcggtggatcgcctccaacggcggcatcaccacggagaccgactacccgtacacgggcaccacggacgcctgcaacagggccaagctctcccacaacgcggtcagcatcgccgggctccggcgcgttgccacccggagcgaggcgtcgctggccaacgccgtggcggggcagcccgtggccgtgtccatcgaggccggcggcgacaacttccagcactacaagaagggagtgtacaacgggccctgcgggaccaacctcaaccacggcgtcaccgtcgtcggctacggccaggaggcggccggcggcgacaggtactggatcgtcaagaactcatgggggcaggggtggggcgacgacggatacatcaggatgaagaaagacgtcgccggcaagccggaggggctctgcggcatcgccatccgcccgtcctatccactaatgtgacatggtgtggtgtacatctgttttcgttttaattatcattttattttattaaacaataaataagtagtcaacatatggatcgactcaaacttttgcagttacgtgtaccagtacacttgttgtaaataataatccatggcatctcgcgtgtaaactttattctggtgcgaaaacgacttcttcaaatgaaggtttgtacgtgtaaaattttgtggtcactatcaagcaaaacaatcgtcatttactc

SEQ ID NO: 5259 - DNA, 1740 bp, Zea mays
acgttcccactttattgtgtttaacgcgtccgtccggaacccagaaagatcgcactacccggcgctcgcgcggctttctttcccaactccgacgaaggctagctacaccacctggtgcgggctcgtctccatcgcccgccacccgctccgtcgtcgtcgtccccgccgcgccgatcccgaatcgaatggggagcctggcgtccgagaggaaggtggtcgggtgggccgccagggacgccaccggacacctctccccctactcctacaccctcaggaacacaggccctgaagatgtggtggtgaaggtgctctactgcgggatctgccacacggacatccaccaggccaagaaccacctcggggcttcaaagtatcctatggtccctgggcacgaggtggtcggcgaggtggtggaggtcgggcccgaggtggccaagtacggcgtcggcgacgtggtaggcgtcggggtgatcgttgggtgctgccgcgagtgcagcccctgcaaggccaacgttgagcagtactgcaacaagaagatctggtcatacaacgacgtctacactgatggacggcccacgcagggtggattcgcctccaccatggtcgtcgaccagaagtttgtggtgaagatcccggcgggtctggctccggagcaagcggcgccgctgctgtgcgctggcgtgacggtgtacagcccgctgaagcactttgggctgacgaccccgggcctccgtggcggcatcctgggcctcggcggcgtgggccacatgggcgtgaaggtagccaaggccatgggccaccacgtgacggtgatcagctcgtcgtccaagaagcgcgcggaggcaatggaccacctcggcgcggacgcgtacctagtgagctcggacgccgcggccatggcggcggccgccgactcgctggactacatcatcgacacggtgcccgtgcaccacccgctggagccgtacctggcgctgctgaagctggacggcaagctcgtgctgctgggcgtcatcggcgagcccctgagcttcgtgtcgcccatggtgatgctggggcggaaggccatcacggggagcttcatcggcagcatcgacgagaccgctgaggtgcttcagttctgcgtcgacaagggactcacctcccagatcgaggtggtcaagatggggtacgtgaacgaggcgctggagcggctggagcgcaacgacgtccgctaccgcttcgtcgtcgacgtcgccggtagcaacgtcgaggcggaggcggcggcggcggatgcggccagcaactgatggcaccgcgtcgtcgagtcgaaccacgtctgtgcgccgcgtgcaacgttcgttcgggtcgagtctgcgtgcaacgttctgcttcctttactagttgttgtctttccgccttcttgccgttctgttctgggctttgagatgagacgatggatggtcagtttttaatgtcagactgaataactacgtatagtactgtagtattactcggagtacgccagaatgtggtgtggtgtcagtctcaccagcaatctggatttgccaagtgtttctattttttcttcggtttgcccgagtgtttgtgattgttaagaactacgttattacggatcgtcaaatccgttcccttctgtctcgtctatagtttagacgcgagaaaatattaaagacacgtctcccattccagaagcacgatagaagaacttttatttctattttaataggttgtttcttt

SEQ ID NO: 5260 - DNA, 1561 bp, Zea mays
caggctgccgtaaggcagcggatctggttcccccccccccccccccacccccccaaaatggttgttttttttttatacaaaacgaccacaaaaacaagcgtcctgctagttctatacatacaacaaaaattaagcgacgacgacacaagtgatgatactatgaactgatttattgaaggggggaaaactacgactagggcataattacatctttgggaatatacacatccgatgcttgagggactcaatgatgcaatcggacctgtgccaattagcacaagagaatgcggtcagccagaatatcactttgacgcaacagtagcagccaaggcattgcgccagactagcagttcagaacttttcacgacaggacaggacaaaaaaccggacttatcgaacatcatatcactcttgagacccattttgagaatcttcttggcaaatatttgatgatgatttgcttggattgattattgcaggcatccattgctcaggaatgacaataaaataagcagacatggctttcctgaaccgcttcttatattgcataggtgaaatgacagttggagaagcgttcttcggcccacctagaatgccagaagattttacccatgtttcaaggtgcttgtcccatgtatactgcctcataaaatcaataattcctaagaccagttcatgtttctcctcgtcgactcccacaagcaaggaatagtccatcacatcgattccagctaggaaagatgtaccgtcacagtcagccctacagattataagaaaacagaaaaaggtaacctatagttacaagaagataaacttggaagcatcagcacttcaagtgatggaaccacagatcaagtaaaaaatgatcaagatggcttagcaagttatacaagaagtcagctcaccgtcatgtttgctattctcaacacataaatcacagcaatgcaatatgtgatactattaaggcccaaagctactcaggagcaggtaaatcaaatttcaaagcaaagtggaaacatgacatgcagccatgcagattcatattccattatctgtcaagtttagtattgttctcttaaaactggaaacacaacaaaagccggtcttctaatttattatattaaagattagccttttaaaaaaagaaaggacaatttctctcttactctcgctgtatactacgactatacaagaacttaaggaaaacaaatgaatataggtctgctaaaagaggattaaatgggaacagagggattaaaaacaagaatgctcagctatgattacgagtcacaaccacccactttggtgctaataagaagctagattctgatccaaaaaatcaggctgaagattgttgaacaaaagaagtgaagttgaagatagctctggaagccactgcatttcctataagctttgatgaggataaattgatgcaaacttacagctaggaaagatgtatcgttccaaacagctctttccagtagccgctttgccttgttcccaacaaaaatcggtgaagttggcattgcttcaattaagttctggtcaagaagaacctgtt

SEQ ID NO: 5261 - DNA, 1398 bp, Zea mays
aagaaaaggtcacatacctgtcgtgttttgttgagtggcgacttgcgagcaccaacaaagccgagtcacgggccgagcccacgggagattcctattggcatctccatccgtcctcgtcggcatcccagccacacacacacacacacacaccgcacctagccacctaccctgctgtcccccgtgccgtcgccgatggagtccctgggcgtgctgctgctccaccccttcaacgcgtacctggagcaggagctggaccgccgcttccgcctgtaccgcttctgggagacgccccgcgaggagttcctccgcgcgcacgcgggcgccgtgcgcgccgtcgtcggcaacgccagctacggcgccgacgccgcgctcatcgacgcgctcccggcgctcgagatcgttgcctccttctccgtcggcatcgaccgcgtcgacctcgccaagtgccgcgaccgcgggatccgggtcaccaacacccccgacgtcctcaccgacgacgtcgccgacctcgccgtagggctcgccatcgccgtgctccgcaggatcccgcaggccgaccgatacgtccgcgcggggctctggaagtccaggggagactacaccctaaccacgcggttcagcggcaagcgggtgggcatcatcgggctgggcaggatagggcaggcggtggcgaagcgagtggaggcgttcgactgcccggtgagctaccaccagcggacggagcagcgggcgacgtacccgagctacacctactacccgtcggtggtggagctggcggcgaacagcgacgtgctggtggtggcgtgcccgctgaacgcgcagacgcgccacatcgtgagccgcgaggtgatggaagcgctaggccccagcggcgtgctgatcaacgtcggccgtgggccacacgtggacgagcgcgagatggtggcggcgctggcggacgggcggctcggcggcgccgggctggacgtgttcgaggacgagcctaacgtgcccgaggcgcttctggggatggacaacgtcgtgctgctgccccacgtcggcagcggcaccaacgagacgcgcaaggccatggccgacctcgtgctcgggaacctggaggcgcacgtgctcagcaagccgctgctgactccggttgtctgacgtttccttgtttctattacgaaataacaagcgcctgcgcctgacagcgagtggggattaaattcaaaatgttttgttttgatttgatcgccgctggtgaatggaactgaaatgtgctgtcaattctcagtccagtgcacacgacacgcttgcacgaatgtcgagcaaattatggcatcttcttttgcgaagccgcctcctcgtctgtacactctcttcccctgcggccactttacgtatctgcgatgaggtttgttc

SEQ ID NO: 5262 - DNA, 1652 bp, Zea mays
ggccgggaaaaaaaaaaaaagagccggagggagatcaaaaggaaggaggcaaagctttgcttctgagagagggagagccggagagcgaagagaagcaggccaacccacccccaccccctgcactgcaacacaatccccccatggcctctgctccagctgctgctatataagcgcgacccgggcgcccccgctgcccgccgggagtagtcctctcctcccatccatctcatgcttcggtccacgcacccacccagccccaccagcggcagctccgcggcgccggcgtccagctccgacgccgcggcgatggtcgggggcggcgcggcggcgggcagcggcggcgcaccgagcggcgccaagctgctgcagatcctcaacgtgcgggtcgtgggcagcggcgaccgcgtggtggtgctgtcccacgggttcggcacggaccagtcggcgtggagccgcgtgctcccctacctcacccgcgaccaccgcgtggtgctctacgacctcgtctgcgccggcagcgtcaacccggagcacttcgacttccgccgctacgacacgctcgactcgtacgtcgacgacctcctcgccatcctcgacgcgctccgcatcgcgcgctgcgccttcgtcggccactccgtctccgccatgatcggcatcctcgcctccatccgccgccccgagctcttcgccaagctcgtactcatcggcgcgtcgcccaggttcctgaacgaccacgactaccacggcgggttcgagctgccggagatccagcaggtgttcgacgcgatggcggccaactactcggcgtgggcgaccgggtacgccccgctggcggtgggcgcggacgtgccggcggcggtgcaggagttcagccgcaccctgttcaacatgcggccggacatctccctccacgtgtgccgcaccgtgttcaacaccgacctccgcggcgtgctgggcatggtgcggtccccctgcgtggtggtgcagaccacccgcgacgtctccgtcccggcctccgtcgccgcctacctcaaggcccacctcggcggccgcaccgccgtcgagttcctccagaccgagggccacctcccgcacctcagcgcccccggcctcctcgcgcaggtgctccgccgcgcgctcgcccggtactagcggagcgcctgccacctacggtcctggtggtcatcggtattttttaccgcctcgatttaccctgtgccgagaccggggacggggatcagataatgtggcgacccgcgccgtttgctgtgcgcgccatgactgtagactgtagtacgagtgtacgacttgttctggacttctggtacccgatttttttactgctttttaatggagagccgagcagtagcactggtaaaaaaaaaaaaaaactcttctcctgcacctccacccaggtcctggtgggcctgctcgcgacacgtggcgagtactcgaggcggtgcacgagctcggtccagattcgccttcgccttgtcctacctgctacctttgttattttactgctggtagtttactgctatgagaatatgagatagggatcagccgccgccccgtcggatattctgactttaaaaaaaaaaaaaaaaaaaactcggaggggggcgcccggtccccatttcgccctatagagg

SEQ ID NO: 5263 - DNA, 2055 bp, Zea mays
ctgcagcggctacagaaattgaactgaccgaagccaattttttaaatttaattattttgtagaaaatactaccaacatttatatctttagctaagattgttaaaatactatattcactaattaatacaacaatattttaatatcataagtatcatttttatataaacttaagcaaaattaaaattatttgaaaagtgaaagtgggaatcgcatgacccggagcaccggccgaagcaggccggaaacccagcccgagaaaggaggaagaaaaactagaaaccctagcgatgctgcagatccgcctgagcaagattggctcgtcggactccggcggtgccgccgctagcacggcagctggcgccggcgcccccgccgcggttggggcggctgcggcgctcggcggcagcatcctggaatcggtcaccgtggcatgccccgaccacctcgtgatcgcggacctccccgtcgcgaagagcctcggcgccgtcacggcctccgctgccgccgccacgcgcgccatcggccgtcgctcccgtcgcccgctcggggagcgcgtccacatctgttcccgctgcgagttccccatcgccatctacggccgcctcatcccttgtgacccggcccccgccgggtcctgggcacgaagcgattctagctgctatctttgtgatgagcgcattcagaagatacaaagtgtgaaaatgatggaggggattttcatctgtgctgcaccaatgtgtctcaaatcgttccttaagaaagcagattttgagttccatgtgcctgatgtccatgccaacctcctccaaactaatctagagaaggaagaagaacgcaatgagtcagatgctcctaacatcccctgtgcttctgcaggggatactcaaagacaatctcaaatgcctgaaatgtctactgcacgtgctcctcctccaaggccaggtgtttcacaagatcgtgaagaacgctcccgctaccaccagtccagggagcaaacaccactgaggcctccacccctttcaaaaccaccgttccatggtcgccattcttacccaccaggggatactcaggccgagaacaatccacctcaaggattcgaccggccatacaactgggcttctcaatcacgtcaggagagcccaggtgcggtgactccacttcgccaagaatctgaccacagtactcaggacaggcagcaattgatggctaatgcaccttttatgttcccgccgattcctcctcaccagggaaactttatgatgcctatgaatatgaatcagcctttgatctccaacgcaccattcaattaccctctccagcaagatggaaaccctcagtacttttctgcccctttccagatgccgccgctaccagatactggatcagaccaaggttccatgtcaagtgtccagcctccagttggccctatgagcttccctgaggggcttcagcgcccatgggctatggggatgatgggtaatccatttcacccgatggcccttggtcagggaatggttgatggtgcgggtgatcctcagggtggtggtggccttgccttcatgcaagctggttttgggggcatgcctgatggctccatgaatacaggcatgcccgatagaggtgatggaaggggtgttcgagcacagatgcccacgccaatgcaaatgcagatgtcacttcccccacctccgcctacacaacctccatcaggctcgcagcaaacatttaacaggacttgatatattttgttttgcacgaatcgatggttcctctcaaaattccatgtcaattcattgaggaaactgtaattttatcgtctttggcatgtaacctgtgagaactagatggctcagttctattccctggtttgataggagcctgtgtattatgctgtaactgtcctgtttgaatgaagtgttcccaagttacgaaattttagttcagggtgattggttgtactaccgttcacaaatatttgaacatatgacgtcgttcgtcttattcagaatatttatttgaaaatataaaatttcaagttaaaaaaaaaaaaaaaaa

SEQ ID NO: 5264 - DNA, 1378 bp, Zea mays
aattccgcgcggccggccgcggagccatccggtcccaaaagtagaaaagggcaagcgacgagcacagcacagcacagcacaagcacgccttccgttttgggaaggcgaggagaggggaaccccggcccagggagagttgtggggaggggatcggcggcggaggagatggaggagcgggagaagctcgtgtgcctggccaagcttgccgagcaggcggagcggtacgacgatatggtggaattcatgaagaatcttgctaggatggacgtggatatgagtgctgaagaaaggcatttgttctcagttggtttcaagaacactattggagcaaagagggcatcatggagaatcatttgttcacatgagcaaaaggtcgcagctgatcgtcagactggtgtgatgatagatgcctataagaagaaagtagaagaggaactaaggaaggtttgcaatgaagtattgtcagtcattgctattcactgccttcccttggccagtacgggtgaaaatatcgtattcttttataagatgaaaggtgactactaccgttacttggctgaatttagcactggaactgaaaagaaagctgcctctgatcagtcacttatggcctatcagcatgccatggttgtcgcctccagtgagctctcacctgctcaccaaatccggcttggccttgccctcaatttgtcggtcttcttttatgagataatgaactctcatgagagagcttgccaagtggcaaaacaagcatttgatgaggctcttactgagataaattctggtgagggagtttacaaggatagcacacttatgatgcagcttctgaaggacaacttagcattgtggacatcagaactaactggaggtgaagcatccaagggtaacgacgatgtcgacatggagggttgatacattctccatgttttaaggaaacacagaaagcacgcaaaaatatccaggctgtgatgctagcgaacctgggtcctcaagttttttctgcatcggaactcagaggagccttgtgtatttttctgaagtttctgtccgtctcgggtttttttttttgaggtctgtttgttcctctcttttggccatcgtttggtcctggagtcagtcactcactaccaagtgtttcagaggtctgaactggtgagcatctagatctgttgttgctttttttttcttcttctgtgcttcagaggcatctttgtacaccgatggaaaactgtttctcttatcaacgcatagactgtcagtgctgttactaatcatgttcggtgactgaagcagtctctgtaatgttgagatcgatcataaacaactccaccagattatgtaaaaaaaaactggtctgaagatgcttcgtcaatgacat

SEQ ID NO: 5265 - DNA, 1806 bp, Zea mays
ttgggaccctcgaggccggccggggcacgtatgctctccactccaactcacgccccggccgggttcgttttgtttcgtttcgtttcggatcgtgccgctgccgctcttcccttctcgtctagtcttgtttttctttcctcctctgttactccacctacagacctactactgccatcgggagggtaagctcttcggagccggagccgggtccacgttaacgccatcgagtgctgcgatgggcagcttaggagggagcgccggtgctggggacggcggcaaggtcgggctgccggcgcttgacgtgacgctcgcgttcccgcaggccacgcccgcatcgctcttcccgccagccgtttcggactactaccaatttgatgatttgctgactgatgaagagaaggcactcaggaagaaggtccgaggtatcatggaaaaggaaatcgcgcccattatgactgagtactgggagaaggctgaattcccattccatgccattcccagccttgccagtcttggtttagctggtggtacaataaaggggtatgggtgccctggactctcgcttacagctagtgctatttcgatagcagaggttgcacgggtcgatgcgagctgctccacatttattctagtgcactcctcgttggctatgtccactattgccctttgtggatctgaggctcaaaagcagaaatacttaccatctcttacccagttcaaaactattggttgctgggcattgacagagccagattatggaagtgatgcaagctccctaaggactgcagcaaccaaggtacctggtggttggcatttagatggacaaaaacgctggataggtaacagcacttttgcagatgtcctcatcattttggctaggaatgcagatacaaaccaactaaatggatttattgtaaagaaaggagctcctggtctaaaagccacaaaaattgaaaataaaattggactcagaatggttcaaaatggagacataattctaaataaagtatttgtccctgaggaagacagattaacaggcatcaattcatttcaggatataaacaaggtcctcgctatgtctcgaattatggtggcatggcaaccaataggcatatcaatgggagtttatgacatctgccatcggtatttgaaagaaagaaagcaatttggagctccactggcagcttttcagctcaatcaagaaaagcttgtccgcatgcttggcaacattcaggctatgcttctcgttggatggcgactgtgcaagctgtatgagtcaggcaaaatgacaccaggccggtctagtttaggcaaggcatggacgtccaagaaggccagggaggtggtttctcttgggcgagagctactgggtggcaatggcattttggttgattttcttgtcgccaaggcattttgtgacgtggagcccattttctcgtacgagggcacctatgacattaatagcctggtggctggcagagagatcaccgggatcgcgagcttcaagcctgctgtgtcagcaaaatcacgcctgtgaaagttgtttttttctttgttccccaatgaagacagtagaaatcaaccttatacattcagatgattgggaataagaacggtaggaaagctgtaaaactcgacgtgcttcctcgtatgtactgttctgtttcaaattattcgacgttttgtcggaacggaacggaagacctgtatggctgtatatgatactcatatcctatatatcactgctccaggtaatttgaagattttgtaaaaaaaaaaaaaaaaaaaaaaaaaaaaaaaaaaaaa

SEQ ID NO: 5266 - DNA, 2096 bp, Zea mays
gggagtgggccaggcaaagtcggctcttgcgtcgacatcgacggggagaaacagctgtgggcaggcgatgaactgtagcgcgtgacagtgaggggatttggttggatccaatgtttggtcggtctgcgcacgagaccattacctagaacatcctaatcgcaatataaagcgacggggcccttgcgctgggcgcggagactggagagggcgagagtcctcccatccacaagttcttagcttttgcgagattgagatccggctggggacagaccgacagaggaaggtgaattgtgggaaagaggacagaaaaatggggattggagatggatcttcaaatgggaaccagcaaccggtgcataaggaaatacgagatgagaccacaccacttcttccagtcaaggtggaggaggacgaggggtttcatgagttcaatggagcttcattctctggggcagttttcaatctgtcgaccaccatagttggggctggaattatggctcttccagcaagtatcaagatgctgggcatcatcccggggattctgttgatcatccttgtggcactgctcacagaggcatccatcgacatgcttgtaaggtgcagccaccagggcaagattacatcatatgggtggctgatgggcgaggttttcgggcagtgggggagaattgcgctgcaggcctccgtcatcataaacaatgtcggcgtgctaattgtttacatgattatcattggtgatgtattatctggaacaacatcaggcgatgttcatcatcgtggtatattggagggctggtttggagctcatttgtggaattctcgtgccattgttcttcttgccacagctcttttggtgttcgctccgttggtgagctttaagcgcttggattcattaagatacacatctgcgctatcagttgccctggcagtagtttttgtcgtaattactgctgggattgccatcatcaaactcttcaatggaactgtagcgatgcccaaactttttccagaattagatggtcttaattctatctggaatctttttacagctgtccctgttcttgttacggcctatatctgccactataacgttcacagcattgacaatgaacttgaagacagaacacagatcaagccgattgtgcgaacatcgctgttcctgtgctccagtgtttacattgccacaagtttctttgcttatctcctcttcggtgaaggcacactggacgacgtgctcgccaactttgacgcaaatcttggcattccattcagttcagtcttcgatgacatagtgcgagtgagctatgcagcacatgtcatgcttgtctttcccattgtcttctttgccctccggctcaacttggatgggttgctcttccccacgtcaaggcacatctctcgtgacaacaagagattcgccatcatcaccgtctctctcctcgcagtaatttatcttgctgccattctcataccaagcatctgggacgcgttccagtttactggtgccacagctgctgtcctgattggttttatatttcctgccatggtcatacttagggattcttacggaatcgcaagcaagcgcgacaagattctggctgtaaccatgatcgtgcttgctgtcctgtcaaattctgtcgccctatacagtgacgcgatgaacatcttccgtaagaaggaagtggcctgatctcagatttcaaaagtagtcagtgctggatgaagaatggtctcgcaatgcaagactcgatggtacgaaggaaaacgatgcgcttggattccgtgaaggaacgatttctttgtcagcacctcagaatttggccacttgaaagaatctgatgcttgaagtttcctggttctgtgtacacaagtcggctcaatgtcagaattgagccgcttgaaatatatttagttatattctatgcggagagtaggtcttggaaacagccttttccacaataatgtacagttattatgccaatttctgagttcagttaaattttgtgaaatatggacatgggcgtcttgtctcgattaaaattgagaatggtatgattgcacattacgtcgctaaaaaaaaaaaaaaaaccgccccc

SEQ ID NO: 5267 - DNA, 3063 bp, Zea mays
gagcagagcacaccatcctcgcattattcttttcggatttgctccacccctccacccccatgcccgtgtccatctcaggctgcgtcacatcatcgccgccacacccagcaccagcaccagcaccagcggcggcgcaccaccaccggtgccatcgccagcgccagcgctagcgccggcgcaagcggaggcccgggcgacgcggactgggcgaagttactggccttcttttcgtcagcggcgttccttgccatcaagctaaggtcttccagcaaggttacgtggagtttaccaatgggtctggataatacttatggcgacctatctggcatgttctatggaggcctgtcttatgatggctacacagaccacagcagcgcaaacgattacttcagatttgccgatccacttcctgccactgtgccccagatggcagcagaagcctgttcaaatccttcctccactgtgtcaagggccaatactgaaactgacaacccagaggattgggaattcatctcagatgagtccctcgactatatcagccggatgctcatggaggaggatattgatgagaaagttagcatgtaccaggcggagtcagcagcactgcgtgctgctgcaaagccgttctatgacattcttgggcacaagtttccaccgtctcctgaccgccagctgatctcttggtccatggacagccccagtgagagtagcagtagcatctgcacacaatctgtggcaagtactgtcactagcagcagtgttggtggcacagtggatagcaacaggcgctatgacattggacttagtgagcagctggaagcttaccgaggcttgtgtggtcaggcttcgaatccacttgttggtacatcaagtgatgcttccaatgcagtggatgtgctagaagaccctttgatcacgaacggtcagatccctgagtatttgtttgagagccttccaacttgggatttcaggagaggtattgaggaagcccagaagtttcttcctattaacaataaactagtcattggtttagaagctggtggtattgcaagaccccaagaggcaaggaaagatgttcctttgaatgccaaaaaggcagatgcattgaaggtcaagaaaaatagacagagtgaagaccttgacgtgattgaaggccggaacattaaactgtctgcattttgttccgatgaacctgattggattgaaatgtttgatgatctgcttcttcaaaccgagaagaaggccacagatctgcgagagctgatgcggaatgaagcttccaagaattctcaggtcacccagacgaaaggaccaagtggaccacggccacggggaaggaaaccaacaaagaaggatgtggtggaccttaggaccatcctcatccactgtgcacaggctgtggcagcagatgaccgcaggactgctaatgaattgttaaagcaaataaggcaccattccaagccaaatggtgatggaacccagaggttagcacattgctttgcagatggtcttgaggctcgattggcaggcacagggagtcagctttaccgcaagcttatagcaaaacgtacaactgcctcagacatgcttaaagcttaccacctttaccttgcggcatgcccatttaagaggctttcacattttctttccaatcaaacaatcttgagtatgactaaacatgcatcaaaggtgcatatcattgacttcggcatttatttcggcttccaatggccatgcctaatcaggcgtctctccaagagggaaggtggtccacctgttctgcgcattactggaattgatgtacctcagccaggtttccgacctactgagagaattgaagagactggacaaaggcttgcagaatatgctgagaagttgaaggtgccttttgagtatcagggaatagcatctaagtgggaaaccatccgagttgaggatctcaaagttggcaaggacgaagttgtgattgttaattgcctatacagattcagaaacctgattgatgaaacggttgctgtagacagtcctaggaatagagtgctcaacaccataaggcaagtaaacccagcaattttcattcatggaattgtgaatgggtcatacagtgttcccttcttcatcacacgtttccgtgaggcgctgttccatttctctgcattgtttgacatgctagagacaactgtcccacgggatgatgcacagcgtgcactcatagagagggaaatgtttggccgagaggcactcaatgttattgcatgtgagggctcagacagagttgagagacccgagacatataaacagtggcaggtgaggaacctcagggctggatttgttcagtccccgttaaaccaagaaatcgtgatgaaagccaaggacaaagtaaaagacatttatcacaaggactttgtcatagatgaagacagcggatggctcctgcaaggctggaaaggaaggataatctatgcaatatctacctggaagcctaagaataactaggttcttggtctcacatgttacgtttcctattccattgatggtagcagctaattaaccagtcctgctatgttatagcatgtggaccttgacctgtgaacctgtctgatcaaggaaatggcttgaagacggataatgatcaacatggagctttgctagcttcacatctgtccagccagtactctgatagactgggtgtagacctctctaccttggtgttggtaccattacttctattaaatttcgtagttttcttctttccatttacttctatgatcggcctggcgtcctattagcaataaccagatcactgcttctagttaattggttagccaaactacctactatcttgagcttagtatttttgacttgtatccatccatgttgaacattatttggttttcagcaccagcagataaaaaattccccaacgaggaagcatgaagcatctaaatttgttatacgagaatggacgctgctgtttgtgtggaatgtagtatctcatggagtgctttgcctttgaaaaaaaaaaaaaaaaaaaaaaactcgaggggggagaccgggtaccca

SEQ ID NO: 5268 - DNA, 1229 bp, Zea mays
gaaattttccgaattcacatcactcaatcaagaccagatatttatggacctgcatttgtggaagttgaaaacatgtttgggttatcaaattttgttcctatcctttttggaagcaaacagttgtgttctgaactagagaggatacatgatgctctttgtggttcttacagtgaaaataatgtacttggtgagtttctcagtgcttcttctgatcctcatgagccaccggaaactttgtagttctgtgatgtctggattcctgatcgacattggatggcttatcagaaagcctactcctgacgaatttaaaagtgtgctgagttcaacaaatatacagagatggatatgcatgttgaagtttttgatacagaatgatttcatcaatgttctggagataatcgtgaagtcaatggacagcatcatgggttcagaggttctttcaaacttggaaagggggaggttggaagatcatgtaacagcatttcttggatatgtaagccatgctcggaatattgctgatcgtagagctaaccatgacgagaaaacacagattgaaacaagaggcattattgttacttctccaaatcagccaaacttaggcgcctcagtgccatttgctagtgaaaacactgactttggaggggataacaaattgaactcaactgatgaggaagaaattatgccacttgtgactagagatgtctcacaccggcactgctgccagcctgatacgactgttaggtggcttaagccctcactgattgttacttatcctggtggtgccacgagaatgcgacttgttacgactgtggcggttgcggctgttttgtgtttcacagcttgtcttgttcttttccatccgcatggggtaggggtgcttgcagctccagtgaagaggtacttgtcgagtgactccgcatcgtagttgatgttatagatcagatattctattttgccgtgccgctctgctctgtctgtatcatctgcgctttgttaagttgaggcatagcttgtgtatctgatttttttgtaagggaaccaacacgcaggtgcttttcatctgtgcaaaactggcatcttttgtttttttcagactgtaagtataggcgccggaagctctgacctgatgtttgggcatgtaaacttctaatgtagtgcatcagttaatggaaaatagctgcattgctgcaaaaaaaaaaaaaaaaaaaaaaaaaaaaaaaaaagcggcc

SEQ ID NO: 5269 - DNA, 1502 bp, Zea mays
  misc_feature (1501)..(1501): n is a, c, g, or t
gcacgagaaggtttaatttgcattggctaagattatcgcataaagttttagagcccaattcaaccacccatctccgccctccggtccttgctcttgttccttgcgatgaacggctgtgaacctcagccttggatgagcttggcgaaaagtatttagtattacaagattcatggtacaagataggtgacattacaaaatcaccaaaataagcgtctaaagtctcacatctaaagaacataaccactactctaaggcctctgtggctgtactgaacatttgaaaattttcacttgctggcaaaccgttgacattgattaaacaccctacccgctgtttgaatgttcctttccagagcagccatgaccccataacaaaagatccaccactcttggcttcatacatgtgtaccaatccaacttcataccagaatatagcaatcatcaccatactgaggcccaacaaaaggctacacgtcatattgcttggcaaaatcatgaatccttggaggaatgcttagtcgcagtataatctaatcacagagtcagcgccagcagtgaacaaccatggttgtttagggtggaacttgcagtccaaaacccctcttccatccgaactagaatggccacgaagaatttccaatggtacaataagtgggttctggttaagatcagaatagaccattccatgacatacataggcagtacaatcctcggaggatgaggcaaaaagagggtactttcggtgaaaggcaacactggtaacatctttagaatggatctttagagtcttgtatggtctggtagatagatcagtatcaaaccagcataattttccatctctgcttccgacaataacattatcaccaccaggatgaatcgagatggaggaaatctcgcgaagacctgactccagcttctttaccaactgcgctttttggagatcataaatctgaacaaatttcttagtagcaacaaagaacatcttctgacttggatggaatgttgcagcaacaggaaggcctggcattttacggaaaggatggtgcgagtgctttttcgtgagctgatgcaacaatacagctctcgtatcaccagttggcacaactgtggtgaagtaatctcccttgtaatgccactccacatttgacacggccttttgatgaactaaggtgatcccatcaagtttttcatgcttcaaccacctcacagctggtttcttgtcatcagtgtcatcttgaagagccatttcatcaaccttgagcagatcttttaccatcgtttgcatttcttcactccccacctcagcattaataagtagtaggtcatgtccaacgacagcagcaagaataggcctgtcaggtgaaggattccaggcaatatgacggacatcacctccaacatcccaaactttaagacagcgaccagtttcaacctcccagacacgaattgtaccatcacaagaaccagatgcaagccactgccctgtaatttcgaccgaaatng

SEQ ID NO: 5270 - DNA, 1437 bp, Zea mays
caccccgcgcctcgcggcggggaaacatagtgcagcaagcaactgcaaagcagcaagctctactcttcttctgtactgaacgtgtgactagataacaataagcgtgaaccatggcggacgagtacggccgcagcggctacggcaggtccggcgccggcgacgactacgacagcggctacaacagcaagtccggcactgatgactacggccgtggcgaaggtggctacaacaagtcgggcggcgatgacgactacggccgcagcggcggcgatgggtacggcaggtccggcggcgacgactacggccgtggcaccggcggtggtggctacaacaagtccggcggcggcgacgactacggccgcagcggcggcgatgggtatggaaggtccggcggcgacgactacggccgtggcaccggcggcggcgggtacaacaagtccggcaacgacggctacgacagcgggtacaacagatcgggcaccaccaacgacgacgaatacggccgtggcaccggcggcgggtacggcagcaagccctctggcgacgacgcgtacgccggcggcggcggtggcgggtacggcaagcagtccggtggcggcgcggacgagggcggagagtacggctcctcccgggacgactcggagaagtacaggaaggaggagaaggagcacaagcacaaggagcacctcggcgagatgggcgccctcgccgccggcgccttcgccctgtacgagaggcacgaggcgaagaaggacccggagcacgcgcagcggcacaagatcgaggagggcgtggcggcggtggctgccctgggcagcggcggcttcgcgttccacgagcaccacgacaagaaggaggccaaagacgcggcggaggacgccggggaggaggaggagtccggccgccgcggcgaggggaagaagaagcaccacttcttcggctgatcgggctgctgctcgatcgatctacttgcgtacgtaggctgctccccaggaccagaaggagcatgcatggagggcgaacaaagtcacgggggtttgattgcccgtctatgtatatcatgtgtagttactgatgatgtgtgtgcatggtacttcgtacgcgtgtttggtgatcgatgtgtggtgtgtgtgtctctgcatggacattttcctactctgcgttttttctctctctactgatatagtatatatgtggtgtgtctatatatgtgtgcacgtggttttcgctcggctttttatcaacgctttgagaataaaagctttctcttcatctgtatattttatttttaatgaaagaaataaaccactatatatttcgacactcttaaaaaaaaaaaaaggaacaacatccaaggccgccaaacttacaaactcgtgcaatgcgactaaatacgttctctatagcggcacccaaaattcaattccatggccggtt

SEQ ID NO: 5271 - DNA, 2814 bp, Zea mays
gccggccgggctggaccgcactcggcactccactctcctccccctgaccccgagttgagtccactctgctgtccgctcacaccaactcctccgctccccctccacccaccccgccccgcgccgcccatcagtgggtgggtgggtggttcgcctcctcatcctctcctccccgcacgtccacggcgatggcgcccgcgcccccgcactgctgacccacccccgccgcgcactctcatgaccgtggtttggtaggtggggcggaggttggtaggccgggacgtgccggcaggcggttacgggaggcgcggccgcgatcccgggccggatctggacgccgcgatggaggacgccgttgccgctgagaatgggatcgagggggagggctacgtcgtcgtcaaggcggcggcggccgcggaggcggagggggactccggcgccagcgatcgtggggatctcgccgcccccgctgaggacgcggcgccggccggatctgaggacgccccggccccggcggtgacgccggacgagaccgcggcacctgccaaggcgccggccaagaagggtggatccggggacgccgccggggtccggaaggcgaggccgcagaacggcagggtgcccgccgccgccgccaccgccgcgccgagggtgaagaagcccggggtcctctcgcagagcgcctccttcccggcgcggggtgccgccgccaagaaggcctcggcggttgctactcccaagcaggccaagggcgtcgtgaccaatggatcagaggcggcagcaggccgggcagccgagaagaaggcgaattcagcgcggacacctgtcgctcgccggtcgatgcctgtcaagtctggatcagcggatgcggccgccccaaatgacgcaattcccgctgtccaagagccacatgaaaacaccgacaagccattgaaacaaatgcagccagggaaaacagaggatgatgtgcgctccaccacatcaagtaccaatactccgcgtgcagcagctcgcaagagtgctgctgttgctgctggttttagtttcagattggaggagcgtgctgagaagagaaaggagttcttccaaaagcttgaagagaaaatccacgcaaaggagctggaaaaaacaaatctgcaggagaaatctaaggagagccaagaggctgagatcaaactgctgaggaagagcctaacatttaaagccacacctatgccaagcttttacaaggagcagccacccaaagttgagttgaaaaagattcccccaacacgcgctaggtcgccaaagctcggccggcacaagccagccaattctgccactgctgcttctgcggatggttctgtatcatgtgagagcccacggagcactgcaaattcgagcaaggtaaatgaagcgatggaaaacaacaaacctcatgcccctgctagaaaacctgttcagaggccagtcgtgaaagctccatcacaggcgtctgcgaccacaaaggctgaagcaagacccgtggtcacaaggccaaagatctcaaactcgaaacctaaggcttcaagggcaaaggttgcgcgagcgcaagaaaccccagctgaagcccctccttcagaacctgctgctccagaagatttcacggttgaacatggcattggagacgccacaggtcctgatctgaccgcgcaattggttgcttcgaacgaagtcccagtccatggttgatcagctgagcattttgcatatttattcccttcttgcagttctgtgaatagcgagggtgtgtgcttcattggaagttgaatcgctcgaagtgtcatggtttatcgtttccggagtagacatccattttgtttttcagcttgtcatcgggcatgccatgtatattgcttggtattgtgttcttgtttaaaatttccagtcttgtgtatattggatttgtttgtcgctggagatcctaggattgttgcaatacgctgaggcaaattgtggattgttttgtggctgttttacttttagccccgccgccattcttgttggttgtacatacttaggggctgtttcgttgtatacttgaggtgccagagaattttgccacactaccacatgtcattcatgagtgaggtctccatagctggagaaaatcttgccacaattgtggttacaaaccatacacgtgtctaaattgaccaaacctatctaatcttaggcaactttagtctttttgctctaagaccataaatggctagggcctgcttggatccatacacttttagctgaactttagcacttagagaaccaaacatgagtgctaaaagtgatgtgctaaattttagcactcattggcctgttagctcttccaagtgtgctaaaatgagttaaaagttgtctagtaggagaaaaagacatttatcttcctcaccctactctctctcccttatccatgtgctaaattttaactctccatttgagagggctaaattttagcacatatgatccaaacatgtccttattataaaaaggtgccttttgtgatgacatcacgaactagttcccaaccaattatcccaagaccacaaatgtttgatatggttagtacttgatgttttgcattaataagaggttgatgatggtgttggtgagggtttacaagagatgatttgttgttagtcttatgccctatttggattcatggtgctaaagtttagcactacacttttagatagattttagcatttataaattcaaatgtgagtgctaaaagtgaagtgttaaactttagctccccttagcaattcatgttctctaagggggtgtttggatcccatgtgc

SEQ ID NO: 5272 - DNA, 3146 bp, Zea mays
  misc_feature (991)..(991): n is a, c, g, or t
accggatggtggtggatggagggcttgccatatccgataccagattattatggtcagcgtttggggatgatgttatgtggtttctaggatcacaagtattattcgctggatggggctgcgatggttagaggcgttggctagggttagagggcgacaactagggttagggacgctggggagaccgaacataaggcttcacccatggtcgacaagggagaagggattttcttctaatctcttgcttaccttcaattgatacggtccttctctttatatagggagggttacttgacctctaagcactagatctaatattatctttaattctaatcttaatcaaactagccttatctttatctaacctacctgagagaggccctgacactttatataacggagtatacgtaatattttggatcaacacattgatcacgtgtagtaccacgcatatattactcctaaatttgatgctaaaactcttttgtaaggtatgtagctacttactatatattaaagcagccatgcatgtatcgaaggatgtctttaaccatcaagctcacttggatgctacattaacactatcatattgtctacatgtgatgaaaatatattatattatcacttttaaaaacatataagtctataatttcgaaatctttcaaaatttacaaaaagtgataaccgcaaaaagaaactacaccaagaaaaaaaatacaacagaaataaaacagtgtgccttacgttttcaaattcaatcattggcatttcagatgaatttgatagcaaattgcaacacacattccggctgattggccaggcgggcgagcggcgcctgccttgggcgagcctggatggtgggaaacgatatttcctcgcgtatccacacatgcagcttggatatatatttttacctatgctgcatctgtgggtgcagagtcaatatggctttacacagttaaccaaacaagggatattgcttggtcaacgcacncggtcagtctggatggactcgtgcgttcagtctggatggacgtgtacagtataccaatcaggtggattgtgtagatttggttgcaccaagagtccaagccgctgatccttcgtcagtcccgattaaatctctcgctagtcaaaattgaacaaaagcagcagatttaatcccctccgattcagatgcaaccaaatagggcccgggtgggcttttgctgtttttgacaaggaacaggagtaggatgtgttcttatattgaaataaaatgggatatgatcaatgcacaggcctccaataatagtaacatgatttaagttgcatggcgggccgaccaatcaactcgactacatcacgcaatgaacgccagaaactaaaattcctaactgcatgtccaatacccctttggttttatctaccaagtatccctacatgattgtttaacagccaaacggaccgttgcctacttttcataccaaaacaacatatgggtgacaaacacgaaaaaagggctacagtactgctacctatacaaaaactcctgtggtcaagaaaccagatatacaagactttacacagcggagaggtgttcgcccgactaggattttcctgctcgttgcggtttcatgctcgctctccgggctacatcccacggcttgtgtggcacgccgatgccttgctgcgaggcgaagaacgactcgtatcctggggagtcgaaggcaaagccagtgtgctttgatgactcccgtgggagcatcgagatcatgtagcttctcgcttcctctgggcttaggtggctggtctctggtagtggcaccctgctgtactcgtgtggctcatccttgtgttgctcctgtattatttggtagtcgtaggggaagagccacctttggatcctgagaacacagggtcagagatggttgacatggtcaggcaaaaaagctgaacttgtcgtaataattccacagaaatcaggtatcttacgatagatataggaaatccccaaacagggcgatgatcggaacaagtccgattgtcagatagaagaaaaaggtgctcatcagaacataaatcacaaaatacacattttcctgtctgtcaaatgacgtcattattgcagagtatatgaaaataaacataaaccaggccactatactgcccgccacacttatgtaatgccacctcgttatagagttgcatgccatgagaaggcggagattcacagtcaccacgacacaagtaaatgccatggtgctaacatcccataggccaagaatcttgccagatgaaccctgaccatgccgacttgcagctgcagtgaagtagaagaacactattgactgatagaaggcaaagaaaccccacactgcaatcactctccacttgaagaatgaattcctgatgccttccttgtaaagctgtgggtatttttttgacagtgacgcgctaacatccttatcaaacaatccaactataattacaggtagcgcagtaaaaataacgttatatagagactgaaaccagtcatcataaaaccgctggccagaaaaaccagtttgaaaagtgaaccagaactgagttagtgtaaatgtcagattcttgtagaagaagtatgtgataaccttgcacagtctcaagtaagaccatcgtccatgtacaagaagcaaatcagtaagaaaacgaaactgtgcaatggcaaagtcactagccataacagcttgcattccttcttggccactgatgccaatcccaacatgagcagcttgaatcatactcacatcattagcaccgtcaccaatgctgagagttattttctgagcgcccttcctaactaaacttgtaacctgtgccttttgcagcggagaaactcggcagcatacaactgagtggcaacttagactcaatccaagaagatcaacacgaagagttgggtccagtgcatacatcaggcatctaccatcaataatgagagccaacttcctttcaggggtgctaattaaagaatgccgggctgcctcgtgaaatcttttcagattctgttttactgaatcgttaataacacgtgcaatttccacagggtcaccccggtcttcagcctccctaatagcgcctgtctctgaactaatgatgaactgtttggtgtcattgtttaccaagct

SEQ ID NO: 5273 - DNA, 2292 bp, Zea mays
gattggtgtaattcctgccacattagatccaaaccgtttaattgctaacaacgcctggtccctttcagcggctgaaagagaccaggcgttgttatcaattggtgtaattcctgccacattagatccaaaccgtttaattgattattcttacctattgaagttatccagcttagctgataatctagcactgctgggccatacagtccttgaggatcgcgctaatgcttcaatagggcttgaacagggcagtgaacatgctatagacttttggaacatcagtgaaaatgatgaattctgctatggtggggcatgtgaagtccgtgctctgtcttcattacaagctttagcatctagagaaaatcaatcggtgttcatggaatgtttccagtgtgaaaagacagtttgcaaagcttgctgtgctgggaaaggggccttccttttgcttaacacctacagggagttgaagatatatggtgggagtcaaagtggtggctactcagcactcacagatagttttgtgtgcaaatcgtgctgcagtgaaattatcaaacgtgcattgtatgtggattatgtccgggttcttcatagtttgcgcagaaaagatcgtcccgcgccgccggcactgagtgctgtgaatcaggtctgccaactggagtacaagaaagcatctgatttatctcaaagtattcaatttggtcagagacaattgaagcagatccttgatggtgaagaatcccttgcagaatttccatatgcaaactttttacaaatggttgaaactgccaatgactctgaaccactgctttcattactggcgccttttggtactggagagtacacgtcttactggaaagctccacaaggtatcacttcagtggaattctcaattgttcttggtggtttatcagatattgcaggagtttccataattgtcagttcttgcggttactcagcatctgactgcccaattgtagagatatgggcgagtaataaaatacaccgagaagatcgtacatttataggaaagtgggatgtacaggatataatatcttcatctccacagcttcgtggacctgaaaaatctagtagattgagtgaagaaccaagacacattaaatttcacttcccaaatcctatccgttgtcgtataatttcaataaaaatgacactttcccatagaggttctcattcaaccaagtttagtggaggagtttgatcttctatcattgaatgatagctcatcttatgaatcgaagccaaccaatttacataattcatttatccatgcaaaaagaattgtagtttttggcagtttgttgagaaaggagatggagcctgacacatcaggggggataatgagaatgaaaagttatttagacagatcaccggccttggggagatttaggatcccagttgaagctgagaggctgagagataatgatcttgttcttgagcaatatctcttagctaattcacctggaatagctggattccggcttgattctttcagtgttataagacctcgtgtgacccattcaccttcttcatcagagttggacatgagggagttttcattgacacgaatggaagatagatttataaacccagcaattctgtatatacaggtcacagttgttaaggagtccggcaagttggttgtagaggaataccgtttaccagaagtaaaagcaaacacgccactatattttgatttcccagatctacaacaggatgcgcgctgtgttatctttagattgcttggtgacgtcactgcctttgtcgacgacatttctgagcttgagaacttaaacttgcggaatcttcctttggcgtcgggactgtctttgtcaaataagatcaagttgtactactatgctgatacatatgagatgggaaagatcggcagtctctcagctgtataatgtatgtgaggtcgtcgtacatgccaacctgggatggtaaccgtccctagaagattgttgtaacctactgtttctacgtgttgttgtggaagtaagagctgctgctacagatacatgatgctttttttttactgcttctgtattcttgcttctttttgcttttgattagatgaccccagtttgagggatgtagggattttgcctgtagaatttctggaaattcatctctttttttaatgtagaatagccggaaattcaattcgatcgcagtccacgaaactgccagctacgtttgtcgatacctgtattgggacctggattattgtatagagccaagaacttgcattgataaaaaaaaaaaaaaaaaagc

SEQ ID NO: 5274 - DNA, 3666 bp, Zea mays
tacctccatgtggtcacctcactggtacttcacacaatgccaatgcaatgcaccagccgacgaagcaccaacagcacttcaccaaataatatgtatactaccgagtattgactactaattcgcgtgcaccagctaactgaaactaaagtttttacataggagccttcactaagccgatataaagtacaagcaattaacctttttcacaaacaagtaattaagcgaaagttattaagagcgtacataattcttctgtagctgcaaatgacatgcataagtacgccggaccggtgaaaagcgatcaggcaaccgaaagagctagtcagtaaaagatacatgctttaccactggtactgcattaattaatgaaggagctagtgctgaacagtgcggcaaggactcctataaattggctgccgtgccgctaccatccaatccactccactccatcatcccgtgcctcacgagtcacgagtcactccaggtccaggctgagcagcaatggcgccgcgaacgctcggcctcaacgcggccccgctcctccaggtacgtaacgtaactcactgccccgaaactctcaccgcgttcgttcgtggcggccgcgtgcgtgttccttcttcctcctgcgctagctgcgcggttctgctcttcagtactcctcttgtcctgacagatctcatctagctcccagctggaagtttcacgcctttccggccattatgtgcgcatggaggtgctgaaaagaaaagtgccgtctttttgcctcactttccagaatgttttttttttcaattcaagatcagaatttttttccccagtccaccgaaccagatcgttcaggtcatgtatgtggtagcagccagttgttgatctgaagcacactcctgtttcctggaacagattctgcggtccctgtgcctcctggccctcgccgcggcggcggcggtgtccgggcggcgccacggggcctccccggcgcgcggcagcgggcagagcatgtacctggcgccggcctgccgggcgcacacggcgtcggtggcggacttcggcggcgtgggcgacggcaccacttccaacaccgcggcgttccggtccgcggtggaccacctgtcgcagtactcgggcgagggcggcggcggtggcatgctgtacgtgcccgcgggcaagtggctgacgggccccttcaacctgaccagccacttcaccctctacctccaccaagacgccgtcatcctcggctcccaggacgtaggcgagtggccaatcgtggatcccctgccttcttacggaagagggagggacaaggtcggagggaggttcgctagcctcatcggcggatcgaacctgaccgacgtagtcatcactggcagcaacgggacgatcgatgggcagggcgccatgtggtggtccaagttccacaagaaccagctcaagtacacgcgcggctacctcatcgagctgatgcactcggacaccatctacatctccaacctgacgctgctcaactcgccggcgtggaacatccacccagtctacagcagcaacatcgtggtgcaaggcatcaccatcctggcgccgaccaactcgcccaacaccgacggcatcaacccagactcctgctctcacgtccgcatcgaggactgctacatcgtgtcgggcgacgactgcgtggccatcaagagcggctgggacgagtacggcatctcgtacgggatgcccagccagcacatcgtcatccgccgcctcacgtgcgtgtccccgaccagcgccgtcatcgcgctgggcagcgagatgtcgggcggcatccaggacgtgcgcgccgaggacatcacggcgatcaacaccgagtccgccgtgcgcatcaagaccgccgtcggccgcggcgcctacgtcagggacgtgttcgcgcgccggatgacgctcaccaccatgaagcgggtgttctggatgacgggcgactacaagtcccacccggacgacaagtacgaccccaacgccgtccccgttgtcgccaacatcagctaccaggacgtggtggccacgggggtctacaaggaggcggcgcgcctccagggcatccagggcgcaccgttccggggcatctgcgtcgccaacgtcaccgccgacctgtccaagtccaggaagtacccatggaactgcgccgacatcgagggagtgtcggccaacgtcagccccgcgccgtgcgacccgctacagggcgcgcacgacggcgcatgcccgttcccgaccgacacgctgcccatcgaccaggtcacagtgcagcagtgcgcatacgacatcccggccaccaactagcagctcaatcaaggagtgtattcggatgtggatcagccgcctagtacaacttgtagttcaggtccaatgcaagcgactagtagtatcaagtctcatcaacacaataacgacagaatgaatcgggcactagcctagaaagcattcataaactccgagcctgtacaccatctacagcctaaagactgacttgactcatcacctgccgccgaagaacgagaagaagccgcctccgcctcctttcttctcgggcctctcctgctcttcgaccatgaccgccgtcatcgcatctctttccaccaatctccaagtagcctgctccagagcaaggccagcaggcgtgggcgggtcattcagcaccagcggcacgcccctattcgtactccggatcacctccgtgtcctctggcaccacgcctagtaaaggcaacccgagcatttcctgcacgtccagcgctgacatcatgtcctcccccttcaccaggtctggccgcactcggttgacaacgatcttgatgtctttgatgccatcgcactccagcagtcccgcgacacggtcagcatcgcggagagccgtaatgtcgggagtggtaacgagcaccgcctcttctgcgggtgcaatggcagtgacaaacccagcatcaacacctgcaaaacaaaacatcaagcggctgtcgttgacgctgtttgcgggtgggctggtcgagcgtcgtagcgcgtccgcgacccaggtgagggtcttggatccgaacgcgaggggcagcttggagcggggcttggagaggcagaggaggtggaggtcgtggagcgcgcggtggcggacgagcgcctggtcgagtcggcagtctcccgcgaggacgtcggcggcggtgaggtggacgcggttctcgaggccgagcaggaggtcgaggttgcggaggccagcatcggcgtcgacggcgacggctgggaggccgaggcgcgcgagagaggcggcgaggttggcggtggtggtcgtctttccgacgccgcccttgccggaggtgacgaccaccacgcgcggggtcgggcccgagagctcgggcgccgtgcgccccccgtggttgcgcgcggagacggcccgcgtggatgccgccgccggaggagggggcagcgggaggaggcgcggcggcgcgaacgccatcggcggactagggttggctagggttttgttcgggagctgggaccggggagaggtcagtccgagttggaggtggtggtggcggcggccgcgaccatggccgatgctacagtacagtatgtgtgtgccaccgcatttttttggtggaaagggttgaggaggcccacgttcacgaacagaacgggacagactttt

SEQ ID NO: 5275 - DNA, 1293 bp, Zea mays
ccacgcgtccggtcattgtggttatcgggttgggtcgggccgtatcttcgtaagcatacacacacacgcgctggtttagactcagcacacagcattcattcagctagcgagcgagagagaggggaacaaaaaggaagggcgaggaggacagggagccgagcgcaagagctgaggcttcgccgcgaaaccccagacctcgcgccgccccttcccctccgcggcgtcgtcctcgcacgctctccgatccaagatgtataagctggggagaggaaaccgcgacaaggtgcagcagttcatgaccattaccggcgccagtgagaaggttgcccttcaggcactgaaagctagtgattggcacttggaaggagcttttgacttcttctatagccaacctcaggtttctgtggtcaatactcggcatcttgaagatattttcaacagatataaagaacctgatgctgatatgataatggtggaaggaatatctcaattttgcaatgatctgcaggttgatcctcaggatattgtcatgcttgtcatatcatggcacatgaaagccgccacaatgtgtgaatttactcgtcaggaattcattggtggactgcagtcaattggggtagattcaatcgagaagtttcgtggaaaattaccatcattacgagctgagctaaaagatgacaataaattccgtgatatatacaactttgcattcacttgggcaagggaaaagggtcaaaagtctctctcactggagacttctattggaatgtggcagttgctatttgctgaaaggaactggcctcttctggatcattggtgtcagtttttacaggtcagacacaataaagccatatctagagacacatggtcccagctgctggaatttgtgaagacgaccgatccacagttatccaactacgacgacgaaggtgcctggccctacctcatagacgaatttgtggaatatctgactgagaacggactcgtccagcgtaaaagatgaacaacggggagatgcatctccaaacaatggttgggctgtacaaacatgatttatctcggtcagctcgacgcccagggcctgatattggcactcctgctcaattcattcaccaaactgttggcatatcattgaatttgcttataaacgtggggaaacataacttgcctgggaagtggtggctgtcagcctgcgatcgtgaactgtaacttatcgaaaatgcaacggagtttgggactctactatatgatttgtttcagtttttcttaaaaaaaaaaaaaaaaaaaaaaaaa

SEQ ID NO: 5276 - DNA, 943 bp, Zea mays
  misc_feature (935)..(935): n is a, c, g, or t
gcacgccgttgatgcgaaggaagaggctgttgcggcaatcatcgcctttgttaaatcgcctaatctctttcagtgtgatttgctcaacatgccagctgtttcacagcttgagaaggacgaaaagtatcagttggtgtatgaactactaaagatattccttactaagaagcttgattcctacttggagtttcaaagtgcaaactctgacttgctgaaagattatggtctcgtccatgacgaatgtgtaaccaaaatgcgcctcatgtctttgctcgatctgagcagccgatgctctggtgaaatcccttattctgcaatcactgttgaactcaggatcaatgatgacgaggtggagcaatggattgtgaaggcaattgcatccaagatattggattgcaaggttgaccagcttaaccagactgtcattgtcagtcggcacacagagaggatctttgggatggaacattggcatgctctgcgcacaaagctcggagcttggaggggaaacattgccagagctatcaacacaatacaagctaacaaagtcaccgaagagggggcacaagggatgcaaggcttggcgatccactgattcagggcagatcagcgggttcgtgaattgagattatagcgtgggagattagaagggcaacctttttttgtataagacaagctgtaatggtttatttacttagatcccgtaaccatgcctggttattccttgtatttggtcagacacgccgcgcattacacatcccaagtttttaccctcgacgtggtctgtcctgataaatttccttccctgatattttttttgccctttccaagctttgatcagtcatgtgtgttccattggagcatctgatgtatcctcctatcactggatggagtgggggtggaggggggctggggggtagagagaaaaaaaaaaaacncccccccc

SEQ ID NO: 5277 - DNA, 1980 bp, Zea mays
catcgggggcctcaaaaataaaatccaattttctcagtctcgagcgcccgcgtccctcgccccgtcgcgactcgcgacttcgcgagtcgccccgtcccagcctcccagccgtcccggctccccgcgaccccgccctccggcagtccggcgcgggggctcctctccgatccggtgagccgaacgaggatcccaactccccgaagaaagcggccacagccagagccagggtggctcggctctcctctcacagactgcgccgcagcgcctagcgctcggctggcagccgctccggccggtcggccccgcgcccccgcccctgctgcctacatccgcctgcagccagaagatctgcctccagcgaccgccctgcctgccccttgtggcttctgtggttctgcacaccagcacacgcacttgtccccaaacaacggcggcggcgatgagtatctcagaagagcttcccggcgaaggatctgacggtgaggaggaggtcttcatcaacgaggaggacatcatccacgagataaccatcgacgaagaagatctccccgaccgcgacgacgaagatgacgacgtcgtcaacgggatggttgattccgaagacgtcgatgattctacatacgcatttcaaggccaccaagatgaagtcttcattgtcgcctgcagtcctacagattcatcacttgtggcttctggaggcaaagatgataggggatttctgtggaggattggatcagaagagggtgccctggagctgactggacataaggatactgtcggcacagtggctttcagttcagatgggaatttgttggcttgtggaagttttgatgggcaaataaatgtgtggaatacagctacacgaactctcaagggaacccttgagggttccgggtcaggttttgagtggcttaaatggcattctcggggacatttgataatcgcaggatcagaggattgtaatgtatggatgtggaatgccgaccataatgccattctgaatacctttgctggacatagtaacacagtgacatgtggtgattttactccagatggtaaacttatatgcactggatcggatgatgcgtctttgaggatatgggacccaagaagtgcacaaagcagacatgttgttcgaggccatggctaccattctgatggattgacatgcttatcgatgacttcggattcacaaacggttgttagcggctccaaggacagttctgtgcacattgtgaatttaaactcgggccaggtcgttggctcattagcaggccacaccagttctattgagtgccttggtatctcgtcaagctatggctgggtagctacagggagcatggatcaaaagctgatcatctgggacctcacgcaccaatccagccgatgcatttgcgaacatgatgagggcgtgacatcactgacatggctaggttcgtcaagatacgttgcgtcaggatgcattgacggcaaggtgcgcatctgggacagcctctctggagcctgcgccagggagttcagtgggcatgcagatgtagtacagtcgctggccatcactgctgacggcaacaccatggtctccgcctcatcagatggctccgcccgtgtgtttgacatctccatgttcaagtgaaggaaaccgggacggagtacatgtttatgctatggcttgattgtgatgcacgattgatcatggcatgccatggtaatatgcgattgtactactctgctcatggaaaaatcgtgcatttgtattgcatatgactccacttgtagtatctattacagcagaacaaaggatgtatttatatatattccgtttttcccctttggagagaaggaatcaattgtgatagcagtgatagaattcggacgggaattctgtctcaaaattatattaatatgagctagtttgggccaaaaaaaaaaaaaaaggggccccctcgcgatctagaaccccacgcgtctgcggacgcgtgg

SEQ ID NO: 5278 - DNA, 2796 bp, Zea mays
cattgggtacctcgaggccggccgggcaaccgcgaggccggccccgacccctccctccattccatcgtcttcgcttccactccccacgttccccgcctgcttcctccaggccccggccagatccgcgcgcccgcggggaagagggcctcctctcctcctcctcccttggctcgcgctctggtcgaggaggcggaggccggtgccggcaggcggggaggtaggtaggtagcagcttgcggttgcgggagggaagctgcgcgcgctaggctgccatggcggtggagaagacgctgcccggcgcgagtgcggggaggaccgtgctggtcacgggcggggcgggctacatcggtagccacgccgtgctgcagctcctcctcgcgggcttccgcgccgtcgtcgtcgacaacctcaacaactcctccgagctggccgtccgccgcgtcgccgcgctcgcgggggaccactcccgcaacctctctttccacaagattgacctccgtgacaagggagcactggaaatggtttttgcttctacaagatttgaagctgtcattcacttcgctggattgaaagctgtgggtgaaagtgtacagaagccattactttattatgacaacaacgtcattggcacgataaatcttctagaagttatgtctgttcacggttgcaagaagttggtgttctcatcatcagctgcagtttatggatcacccaaaaactcaccctgcacagaaaattttcctcttactccaaacaatccatatggcaaaacaaagctcgttgttgaggatatttgccgggatatctaccgttcagatcctgaatggaagatcattttacttaggtacttcaatccagttggtgctcatcctagtggatatcttggcgaggacccacgaggaattcccaacaatcttatgccctatgttcagcaagttgcggttggtaggaggccagctctaacagttttaggaaatgactatgcaacaagagatgggactggggtaattctgttgcatatgatgtgcttaattgtgtttttttggtataccattcaaattgattaatctgatgcatttgaagctgggtattccaaataaaactgttgtcaattttctgtcaaaatttaataatctgtggtaggtatagtactaacaagagttatgagaactgtcatctcttccttaaaaaacttgactaggtctgtttatatgacttgctgcctagtgtattgacccggcttgttgaagttgatctttaactacacaggacttcctataatttacttttatttcatatattggctatgttgcatagttttcacctttttctttctcttctttggcaccctgctgtttatatctctatagtttttcctctgcactttgtatggttgctatccgattctatatttaattatttataatataccacattaggggtgtactgaatttcccttataaaaagaagattgattcattgctttgtcatttccttctctatgtaagccacaagcttaacttgaattctggaacgatttataacctacaaaatcttctcattttaattcatctgactgaaagtttggaagatactcgcacaatagaacatatgatacccatgtgcttcttacttgagtcaattattttttacattgcttagggttaatgattttgaatcaaatatttagcgatatcattgtgacatctgtgattcacatgcgtcatggaatcatcccatctttaatgactaggctactagtgttgggactggggtccgagattacatccatgtggttgaccttgctgacggacatattgctgcattgcagaagctttttgagaactctagcatagggtgtgaagcgtacaaccttggaaccggaagaggtacatctgtgctggagattgttaaagcatttgagaaggcttctgggaagaaaatacctctgatttttggtgaaagacgcccaggtgatgcagagattctgttttcagagactactaaagcagagagggagcttaactggaaagcaaaatacggtattgaagagatgtgccgcgaccaatggaactgggccagcaagaacccttatggctatggatcacctgactctatcaagcagaatggtcaccaaacaaacggatccgctgactcctccaagcagaatggccaccgcacaaacggttcaactgactcacccaagcggaacggccaccatgcgtatgggtctgctgactcacccaagcgcaacgggcactgcgtttttggatcatcagacctcaagccgaatggtaatggccacctgcgctgagcagaactgtttggcctgtgagctccctgtacattcggttgcgatgtgagctccctgcacgttcggtcgaggtctatcgtgaacccactatccgagattgatgtggatcattgggttgacaggtcatacagtatagagccggtggcagaggaattcctgtttgctgtgggtaaagcttatcttctgctttcgtgttttttcttgcttctttcgattatggtgtaggaatgtggtcataatgtattagctgattatcctttccctgctaattggactttattacgcttcattaagtttggctgattactgtttaacggggaaaagttgcacctgtgtacgattatttatttgtacctgtaatatttatggagaactagcctcgccgcaaatagccctgatgaattcagctgcagtttattcccagattggactgttgtttaatgtgaatgtaaatatgatgcctctgcaaacattgagcagat

SEQ ID NO: 5279 - DNA, 4184 bp, Zea mays
agagcttctagttagttttagcgttttagcgttttgtttgtgtgacgtgttgggtttctagtgggctgttttgctagtgcttcttttcttttctttgccctcctctaccctagtgttgttttttcttttcctttccggtgtttgtaagtgtctctttctaataaatttttggtcatggcaatactcttgccgtgtcctttttcaaaaaaaaataatagaccaagcggtggaggagaggtggttttgcattttgctgccgttgctatgctcggtctctagatctcaccatcagtccatcaccattcaccaccgcctgcgcctgcaccttcacctgcacctgcacctacacctgcacctcgactgcatgccaaccgggggctgcctttcccgccgcccaccacgatcatcgtcctggaacaggaatcagaatctcgctgttgtgttgttcacttgtgctgctacagcgacacgcctggatcccgagtcccggcccgattcccgttcccgttcgactccctctgctcatcctcggaaacggattccgccgtcccgtctagcaaacctctctctcttcagccttttgattcccacctctccattcccagcggctataaatccccgcgtcgccgctgcgccaaccccccctggccccctccctctccttcctaacatcttccttcgtcagccgcagatgcgccagcatctctcccacgggcagcaggaggaggagcgagaggcacagtgacagacagagagagagcgcgcgcggggggagcccagcacagcacctacactagctagccaccaccaccaccaccaccgaccgaatcgggtgcgcgcggcgcgctgctcgtcagctccggccggccgcccggccgctttataaagccacccacccagccccgcccgatcgccatcgccatacccccgcctccgtccacggacacacacccgccttgccagccggcaccctcccggcctcccccacctgtgtcctccggcctcgccgccgcaaaacccgccgcgcaggccggttgctccgattgggagtgccaatcggagccaacagcgagggaagcacatgctgccgttcgtcctagagttcctcattgatgtcgcctgtgatcagtgagatcctcctctcggggtttatgatcaactccacactccggcgccgcacccacctggtccagtccttctccgtcgtcttcctctactggttctatgtcttctcatgaactactcgcccccatcatagccacgccccttctctcccactcctcctcctcctctttcccttccatctagtagcatctaccgtcctcctcttctctccgtgtcagtctctgccttcgtcgtcgccgtttcagtcgttccctaaaccttctttagcttgcatgcacttccctactgctgctagcaaagacctttattactagtgtcaattaagttacgaaagaagaagaaagaaagaaaatttcgaggccgagaaaaaagacggctttgatctctcgctagtgtggtgtggtagtgtgtgcttctagtaagtaagcgagccagggatcaagaagcagagagctgctctgtctcttttgtctcttgcaagaatggcttcctccagcgggagcgggagctcgggctccctctcggcggcaacggcggccctggccgccgcggcgggcacggaggaggagctgcgcgcgctcatggagcagcgccgcgcgaagcggatgctgtccaaccgcgagtccgcgcggcggtcgcggatgcgcaagcagcgccacctcgacgagctgaccgcgcaggcggcgcacctgcgccgcgagaacgcgcacgtggccaccgcgctcggcctcaccgcgcagggcctcctcgccgtggacgccgagaacgccgtcctccgcacccaggccgccgagctcgccgcgcgcctcggctccctcaacgacatcctcgcctgcatgaacaccaacgccgtcggcgccgtcgccgtctccctcacagccgccgccgccgccgccgcttcctccgacccctgcctcgccttcgacggcgccaccgccctggacgacctcctcagatcctgccccgagaacatgttccagtaccagctctgctagctccagaccgcgcgaagtcaccatggcagcgcaaaacaccttcttttgttttgttttgtttttgtttttttttcttcttcttcttctggtgtttcaggtttagtaatctgctagtgagatggaagaactgaggtcagatcagacgtggtggtgactagccatgaaagtgaactttactgttactgtactgtgcgatcaactggtgggggtaattagctagctagctagctgctggggctatggttaatgcatgaactgctattagttaccaggtgtaagtgtaactctcgagtcctgctcttgttactgtttgtgtactgactgtgtcactccactactatgtaagaatcagagcagtaagtttactagtgtctctgctgtcaaacaaaggaagtgcaccatataatctacactttaattactcttgcctgtgtgccctgcagcgatcttaacgttaaaaaaaaccctgtcagtttttctctttattttcaatatatctatcttgagcaaggtttatcttttcctgcacctctgaattatggcactattacactgtcagtcgccagagctggctctgcctctctgtgctgctgtctagctgtgagcttcagattttaacagctgctggtacattttttctgatgcccatgggcaaaagtggtgcacaagcatatcctccccgttttaaaactatatttgcatctaggcatattttatgtcgtcaaggtacataatgaaatttatgaacgcgtagaaatgccgaaacattttataatttaagacagggatagcattatctactattcaccggcagaaagctcagcttgatattcttcaaggtagtgggaataatcagagtgacaacagccggtctttttacggagagaatggaataacttggcctcattttcctgtttcacacacatatatatatttctgtggattcggtcgagtacagtatggacggcggccattgagcgtcgagaaagagattctccaaactactctctctgtcctctcccactcgtagacatagtcacagccagccactctgttcccttgttttgttcttcttctttttttttccttgaggggcttgattgtaccagaagaccactttctagttgtcatgggttcatggaccagcagcactgttgcgtgcattggtaccgccagtacaatgatccctgcctgcaagctaatggctgcagcactagtggcagccctcagtgccatctgtgtagctctgctcatctctcagtcccacggcacacagatatttcagttcattgcattccattccattccattcatcaggacacagctcacatcatctctctctctctctcttgggcttggtacccacatggtgcactcactgactctcacacacccacaagcaaatctgatcttccagtggctgtaactggagctgcagaccaccaactactcccccgagtatacgatgcatggtgctcttgtatggcgttggcatgcatgcaatggaatggaatggaatggaccactggcactgctctctgcaaacgcaattggtgcaatggacctgcaatgcctggggctgggaggtagcggctacattgatggagtggaatagagccagacagccagctctctctctctctctctctctcacgcgcacacaggggaggggaggggaggggaggaggggattgctgcacaagccactgcgcaaaggggcgggaatcaaggccaaggacgtggtcacctcccctccttgcagcccaagcctccacctttcctcgtctccacccatccatccacacagagacggaggagaatatgtcgagagccgcccggaatattctccaccgtaccctcgggtctgtctgttcactgtcgacgccgaggcgacgatcatcgatcacttccggtcctgaagatttcagattcatcagtaattaatggttatatgcgaggctgaggcatgcacaaatcaagtcctcctcctgatatggtgaatggtgaatcagtggtacatttttgtcgggttttcttctgcttagtacatgtctctgtttagta

SEQ ID NO: 5280 - DNA, 2554 bp, Zea mays
ggtacccgcgtctcgggccggaaaccgaacacgaccgtcgccgtctctactcccagtcccagctgccaaggtcttcgtcgcctcgtcgggctcgggtcctttgccggcgacgagcgcgtgcacaccagaagaatacagtggaagtggtatgcggttgtaaaacgatttcgattattccaagcggccggcgatggctcggagcccctgcgacctccgcctcctcctcctcgctgcagctgcagctttcatctacatccaagtgcgcctctttgctactcagtcccattatgcggaccgtcttgcggaagcagaaagatctgaaaatcaatgcaccagtcaattaaagtccttgatcgatcaagtcagcatgcagcaggagaagattgtagcattggaagagataaaggtacggcaagatgaagaacgtgcacatctgaggattttgataaaggatcttgaaaaaaggagtgtgcagaagctactagacaagaatgtggttcccgttgctgctgttgtcataatggcttgcaatcgaccagactatttagagagaacagttgaatctatcctgaagtatcagacatcagttgcttcgaagtttccgctttttatatctcaggatggagcaaatggagctgtgaagaataaagctttggaatataaacaaataacatacatgcagcatgtggatcttgaacctgtgcaaactgaaaggccaggagaattgacagcatattacaagattgctaaacattataagtgggccttggacaacctattcattaaacataattttgctcgagtaatcattctagaagatgacatggagattgccccggattttttcgactacttcgaggctgcagctaaactacttgataatgacaagacgattatggctgtttcgtcttggaatgacaatgggcagaagcagtttgttaacgacccaaaagctctttaccgctcagatttctttcctgggcttggatggatgttaacaaagtccacttggattgaattgtcaccaaagtggcctaaagcttattgggatgattgggtgaggctaaaggaggtacatggacatcggcaattcatacgcccggaaatttgtagaacatacaattttggcaagcatggatcaagcttgggacagttcttcgagcaatacttggagcccattaagttaaacgatgttcaaatcgattggaattctgaggatctgagctaccttagggaggataagttttcaaccaaatttggaaaagaggtggctagtgccactcctctccgtggatcagatgctgtgttgaaagcccacaatatggctgaggatgtaaggatccaatacgacgaccaagaaggtttcgagcagatagctcgtcaatttggaatattcgaagaatggaaggatggcatcccaagaacggcttacaaaggagtggtggtcttccggtacaacagtagtcaaaggcgaatatttctcgtcagcccagattctcttcgtcagctgggggtgtagcatgttgagaaggtagatttttacccttggaatggcaaatatcatggaattgcttaactggtttctgtgagcatggaggaaccgggatgcatggtgaagaaattttttttgagaagtgattgtgttgacccaaggtactgagtagtagaagcatgggcttggtttataggacatttgcaagatataatacatcgttgttatatctttctccgcatccggaaatgtttagtcagtatgggacttgttatccttgagtgtatttagggtttacacgatgcagttgcatgcgctcaaaagagtgtagcaggagctcactagctgacctgacgctcgatcctttttggtagaagaaaggtgtatctttatgaccaaatttttcttattgggcatcttggaatattaagatggaaggaaatcttgtgcattcgtttgttgtactgttttgtggtgacttcgcagatgtgcgacgagatgggagtgtaagcatccaatcaattccatcgagtttattgagctgtcttgttctgaatatgcagtgcgaacctgagtggttgatttggtttgtggtgcgcaagcttttcattcacctactaaaaccttggatggctcgtgtatacatatagttatatatatgcaacattctgaaattcttttttaagtttttggtttgtagaggacgggtgggagttcatttcatccaaatgcatgggactggttttcctagttgagacgggatttgagtcaaaattcaaatccccgttggttagtttctacgtatgttttttttcttttttatgtcgagcagtgtctggcattattctaagggtccattagccgtccgtgtatgcctttggagcttccaatgcgcattgccgaaagacactagtttcagagtgcaggtgtgcccagccatgccgcagcccaattgcattattagcatgggagaagaaaaagaaaaaaactaacaaagatgaagactagatacaggagtttctctctaaacatcaggtttcagctctgacaactatccggggg

SEQ ID NO: 5281 - DNA, 2347 bp, Zea mays
aataaaaaggggggaagagcattttcccttttttttgctcccctcccccctcgcttctcccgaatttgatgcttaaaccctcgccgggaggaggaggactccacgcgcgagcccgcccgcgccacctaccgccgcgcccggatccccgccatggccgccgcgccgcaccgggcccaggtccccgctgatagcatgactccgctgcagacggggcctgtacttgagaataacccctccaagagtgcaaacgccaaggaccagagaatgtgactacaggcaatgcacggggcgctagctccttgagaccgccaaacggcccaccagagaaggctagctctgtgggaaaagctggagagcaaccttatctctaccagcaaaatgtgtatgcaccgcagccacaaccactctattcactagtccccccccccccccccggacaatgggaggaatatccccattatgtgaatatggaggggctccattccgtatctcccggaatctacaatgacaaccagtccctcatgctatctgctggatatgcaaacaacccccaaatgatgtatggagcatattctcctgtttccactgctggagatggccaacaatacttccctgtgcactattccttctcaaatccttactatcaaccaccagcttctcctagcatgggatattcaaactccgcaactggaatgtcccaaggagaccctatgctgcagcaagagtatttccttcctgatggccttctatattcacccacaccagggtatcatcaaccattcagctcatttgacagagcactgacacagccaaataatgctcctgggttgtttggtcaagggagtctaccactggcttctggaatgcatcatggatcgatgtatggtcctggatcctacaagggacgccagtatggtagcaaatttggtggcactactccaagttggagttctgctggccgcagatttggtactttcgacttgagtggcaatcaacaaagggggagcatgtcatttggtagtcataatggctctctggagtttatgaatgagcaaaaccgtgggccacgtgctacaaaaccaaagatacaagacacagagaactcaggagatgagaaaagcgagaaaactgttcttctaattgatagtgaactgtacaatcgctctgattttatcactgagtacaaggatgccaaattctttgtaataaagtcctacaccgaggaccatgtacataggagcattaagtataatgtttgggctagcacagccagcggaaacaggaagctggattctgcttaccgtgcggccagagagaaagaagagcattgccctattttcttgtttttctcggttaatggaagtggccaattctgtggcgtggctgagatgattggacctgtcgattttgacagaagtgttaattactggcagcaggataagtggagtggccagttcccagtgaagtggcacataattaaggatgtaccgaacaaccttctgcggcacatcattcttgagaacaatgacaataagcctgtcacaaatagcagggacacccaggaggtgaagctggaacagggcctccagatgctaacgatcttcaagagccatgaggctgagacaacaattgtggaagatttcgacttctatgagcagcgggagaaagccttgcaggagaacagacgtcaacagcatgctgccagcaccgatactcagaaactggtggataccaaggctcaagatgctgtggccgacatatcagatgcatttgccaaggccgtccagttgaagaatactgagaacagtgggacaacccccaaaactgagggtgcttcagctgaaaagggttccgctgccacagccaaggttgaaggaagtgcaaacctgaacacaggccctgtggaggaaagcagttgattcgtttcccttctatctgcaaatttggagcagcagatgaatagcatggtgcgatgtgaaggtcagaaaggggaaggtgtgttgaatatggtcgtgcccccgtcagttgtacaacatcataggctttcttttatggccatttaggttataaaatttcaatatcatagttccaaaattgttgttcccggttgtcttcgttcctgttctgttttgcttccgtcttccatgttcctgtgtcgtaccatgaatgatggttcaatttagtgggtttaggcataagaagctgcagaattatgccgcggtaaagttgcattttctgcagctgaatgtgatactctgcactgtctccatccttgtgtaatttcagagatcctttctctaacagcaacggcgacagcaacgcctgtacactgctgccctcctcgtgc

SEQ ID NO: 5282 - DNA, 3635 bp, Zea mays
  misc_feature (2002)..(2002): n is a, c, g, or t
cccgtggctttgccttcgtgactatggatactcttgaaggtgcaagacgctccatcaagtatctgcaccgcactgtacttgaaggtcgcctggtcactgtagagaaggttagatgctgactgtactgattcattccattatgcatttttctattgtattttttgttgaatagtgctagttttgtcatgttatcgttgtatagtaatgtcaagtagtctaatactagcagtagtacagttaaaaatttaaagctactatacggtcatgcatgttttttgtcttatgcttgtccctccccttcccactttagccttgaaatcactgatgtcttagtaacataaatgcattaatcttgtgcactggaaattatattccattacattaagggggtgtttgaatgcactagagctaatagttagttggctaaaaaattgctagtgaaattagctacctaactattagctaatttcctaaaaatagctaatagctgaactattagctagactgtttgaatgtcttcagctaattttagcagctaactattagctctagtgcattcaaacaccctctcccacgcctctgatgctatgctctgttcagtttaaaactctggtgaaggtccttgaggtgaggtatgttatgacttatgagtagaagattacaaatatgctctttccctatgatggaagagtatattctgtaacagacaagcctggaaaccccactcaggtgaaatgtgccagagtaaattgaaaggggatcatttatgatgtgttctgatgcaatcctaatgtggtgaatggggaaaacctcttctgtggctcttcaactggggtcttaactctcatctcgtgctgacttcctgaccttccagtttaacatggtgctgggctgcctctacgtcaacctggttggtccaggctgtgcagtctccaaccatggttgtctccaaaggatgtgcagctgacgtgatggtgcttatcaccacaccctcagagctcatcaccacttgccgtcttcacctcgctcaccgacaatgcatacatgctacatcaacacgacggctgtcgccatagagcgatcttggagtcttgttgtgcatcgcgtcaccaccatcgccaccgcaacttctaccacaaccgccatcgtcaacatcacgctcgtgatccaacaggctctacgatttgtctgcttcgactaagcttacatggtgcatgctgctgccatgtcacgacaccaaccaccaagtctgatgcgaacttcatcgaccagtatcttgatttgatggacatcacgaggcgcataatctggcgcttccttggaccatggctacaccgaccacggaacaagtgcacaaaagtcatctttggtttagttggcatgcaacgtaaagtttaatctacctatatcacaagattttgatcaagagttgacaagcttaatggaccatgactatttttcaccaaaagggcaaagtttagtttcattatcaattatattaaccactctgttcaaatttaagatcgaattgggttcttcctttatttagcatacttgaagttcattgcttgtttcattcgtaccaactaatacatttgttcacgattttattccaggctaaaagaactcgtgaaaggacccctactcctggaaaatactgtggtcgaagaggtaggatctcaaagttgagccaattttgcacctccacatgatatgaccacaacgctttctgtattaagcatcgtttgacttgcttctttatgtgttgttcagcttgcatacattgttgttgaatggatatcactttatttgtttgcagttgtcagatgtgctatgctgtttttttaatacataaacatgaacttagtctaaatattctgtgccactcatagggtatttgtgtgcttatttgttttatatattgatctttaatattctaatgattgacctcgatgggggtgttatgtttagttgtttattacaacacataaacatgaactcngtctctaaatattttgtgccactcataggtttgcttatttgttgttttagtgatcttaatattctaattatcggccttaatggggtgttttgtttctacaacctgtgattataattgtagcttttatggtgttctctatttttagctggcataattccacactattgaagccctggtagacatctatggtctaggtggtgttctatatttttagccggcataattccacactatcaaagatttgagcacacatctatggtctaggtcattgttttccttgattgaaatcacactttcgaagtagatcacacgcgtagccatgggaaaattgtgacagttattatgtgcaaatttggttgcatatatctttttataggcttgtgatccacgtgtgctcttgaagcatttgcaagacgctccatcgagtttctgcaccgcactgtacttgaaggtcgcctggtcactgagaaagctaaaagaactcgtgaaaggacccctactcctggaaaatactgtggtcgaagaggaggatctcaaaggagcccatcaccttaccgccctcgcagaagggagcgttcgcgctcaagggaacgcagaagggagcgttcgcgttcaagggatcgaagggagcggtctcgctcaagggatcgaagggagcggtctcgctcaagggaacgccgaagggagcggtctcgttcaagggaccgcagggagaggtctcgctcaagggaccgccggagggagcgctcacgctcaagggaccgcagaagggagcgctcacgctcaagggaccggaggggcagttcaccccatggcagaaggcatagagatcggtccaggtcacccaccagcaatgggaaccataaggcagactaggaagcgcttttatggacttgtcgttgattgcgtgaacaaaggaacttgtaacactacctataaactggtcagactgagacggttagcatggatttttagtagtgttgctgtattttgttgtttcatacaagtactctattctgttagctttcggatcgaaatgtcggatgatgatggttgttattgttctggaaatcgtagacatgtcctccagaatacctatgaaactatggcatactcgtgtgtttgcttaaggttgccgtcggctgcgccgaccgcaacgttgacacgttgcacggtagatggatgcctctgttcaatctcgggtggtctccggactatttttagtccctccattttatttcactatagtctataaattgcaaaatatggaaactataactctattttatttttcatatttgacaatttagtgactaaagtggaataaattggagggactaaaaattagtctctaaaaccaaacacccctaagttgcctaagttttcaatgtttcattagccatcagtaggctcgagtcatgcggcagaggcgatccgtagtactacttgcatacttattggaccaggaaggaaatgttacgtgcgttacggttgaatttccagtcaaactcggaccaactttccagggtcagaatcaaacgggcgtactgtttgtactcgaggattccattatacaatggcacactcatgccgtgaaaaccatggaaactgcccacaagcgatatgtcaaaca

SEQ ID NO: 5283 - DNA, 1538 bp, Zea mays
cctaatcaaaaaaaaatccgcgccatggtcccccatcccgtccctcccctagtcccctccgacctcttctaaaaatcctggtggctggctctcgttgtcctcaagcagtcaagctcctcctcctcctccccccagtccctcccaggctcccaccccgccttgctcgcagcctccccaaaaccctagccctagccctagccctagccctagctctcccacacccgcactgggagatggacggcggcggcacgcaccgcacgccggaagacgtgttccgggatttccgcgcgcggcgggctggtatgatcaaagcgctcaccaccgacgtggagaagttctaccagcagtgtgacccagagaaagagaatctgtgtttgtatggtcttcccaatgaaacatgggaagtgaacctgcctgcagaggaggttcctcctgaacttccagagccagctctgggaattaattttgctcgtgacgggatggatgaaaaagattggctgtcactagtcgcggtgcacagtgatgcttggttgctggctgtggccttttacttcggtgcaagatttggttttgacaaagaatccaggaagcgcctttttgtcatgattaataacctccctacaatatatgaagttgtcacgggaactgccaagaagcaaaccaaggagaaaactcccaaaagcagcagcaagagcaataaagctggcccaaaaccgccacgccagccagaacccaactcaaggggttcgaagatgccacctccgaaggatgaggatgacagcggaggcgaggaagaggaggaagaggaagatcacgaaaacacgctgtgtggttcttgtggtgacaactacggacaggatgagttctggatatgctgtgatgcgtgcgagacttggttccatggcaagtgtgtcaagatcactcctgccaaggccgaacacatcaagcactacaagtgtccgaactgcagcggtagtggcaagagagcccgagcatgatgatgctggatatatccatctctcatgcctgacttgatgtaaaacacccacatggggaccgaatgcccgatggctgttgctttcagtgtaggaccagctgtagggtcttgatgtgctgtttgctgtagtatgtcaaagacgttctagatctattgttagtaactagcaactaattgtagtagcctgtatttcttcaatcttctcccagggcgcctgtgctgaactcaaactgttttagatctaagttgtgcattatgtatcactcatgttagtttgttaaaaaatgtgttagcattcgtatgaaacgccaaccatgtttacaaattaattaacttcaagtctatttgcgcgcaccggtggtttagtctccccagttgcagtttcccaagtatgttgtatgccctatcctctctagattctctagattttgagacgtattgctgcgtcatctttccatccagcagcgtatctttgcatactttctggggtatggtgtatgtaaaccagaacgtagtggggtttgacttttgctgtgctgca

SEQ ID NO: 5284 - DNA, 1306 bp, Zea mays
  misc_feature (2)..(2): n is a, c, g, or t
  misc_feature (5)..(5): n is a, c, g, or t
  misc_feature (8)..(8): n is a, c, g, or t
gnaanagnatggtgctagtcttcctgttggtgcaggggtgggaaggaagaccggttggctctcaggtgggtgagctcatgctcagatgatgcgaagaccgtctttgccgctgtgaccgtgccactgctctataaatcatccctagctgagccgaggtccatcccatccaggtcaatgttcccaacatttgatgttggtgatcggatccttgctgagaagatttcgtacattttccgggaaccggaaattcgggacattgtgatctttcgggcacctccagtccttcaggcattgggctacagcgcaggtgatgtgtttatcaagagagttgtggctaagggtggggacatcgttgaagtaagcttttatcccaatggtacgtgatggtaacttgattgttaatggagtagttcaggaggaagaatttgtgttggaaccagccgactacgaaatggatccgctgactgtgcctgaaggctatgtctttgtactgggggataacagaaacaacagctttgattcacataactggggtccacttccagttaagaacatcctcgggagatctgtgctccgatactggccaccatctaggataacagatacaatatatcagcatgacatggtgcagcacacagctgttgcatcctgataatacattgtggcaataccacgtggtgcacgccaatttctcctttccctgcatagctttattgacaattgatatgcttagccgtggggttctttatttatttgttgtagccttgcctcaaatgtcgattgggcagcttggctgacagattagtttttttttccctccctacgggcagatgcttgtttaaagacagcaattcttgtactccgtagctaagaatgaatgccatataaatgttgcagtagataagcatcaaggagtgtaggatgaggatggcagttcttttgttttatgagatgagatggtgctctaaacttacgtaaaggaaatacgaagcatagaagagtgcccaagttgtgttatttatttttttcattccttgatcttggatcaaagattcaaggcaaagtcagcctggtgcaaaggttttggttgaatccttgtatcctgccagataaggttttttgatggtgcaattttggattagcatttgccctagtatttagtgttttttagttctgtattcatttatgattaatacaactttgcgagcatagttctgtttggcctgctttgttcaatcgcagtgcgggttcaatactacgttgcctgatgttattgtctgttattttctttgtaaaaaaaaaaaaa

SEQ ID NO: 5285 - DNA, 2001 bp, Zea mays
aagagacagagagggggagtggtccgaggtcaataggatataactccaggactcctctccatcagaatcagagacgagtcgagtgagggggcagaggccacaaaacagagagtacccaaacgatcgatctgtgcatctccccgtccgtcccgcaaccatctaattcagaagcagacatcaatggcgagcaacggctgcaacggcaacggcaacggcaacggcaacggcaaggcggctccggcgggtgtggtggtaccggagatcaagttcaccaagctcttcatcaacggcgagttcgtcgacgccgcctccggcaagacattcgataccagggacccacggaccggcgacgtgctggcccacgtagcagaggcagacaaagctgatgtggacctggcggtgaagtccgcccgggacgccttcgagcacggcaagtggccccgcatgtcaggctacgagcgcgggcggatcatgagcaagctggcggacctggtggagcagcacacggaggagctggcggcgctggacggtgccgacgccgggaagctgctgctgctgggcaagatcatcgacatccccgcggccacgcagatgctgcgctactacgccggcgccgccgacaagatccacggcgacgtcctgcgcgtctccggcaggtaccagggctacacgctcaaggagcctatcggcgtcgtgggcgtcatcatcccctggaacttccccaccatgatgttcttcctcaaggtcagcccggcgctcgccgcgggctgcaccgtcgtcgtcaagcccgccgagcagacgccgctttccgcgctctactacgcgcacctcgcaaagatggccggcgtccccgacggagtgatcaacgtcgtccccgggttcggccccaccgccggcgccgcgctcgcctcccacatggacgtcgacagcgtggccttcaccggctccacagaggtgggtcgcctcatcatggagtcggccgcgcggagcaacctcaagacggtctcgctggagctcggcggcaagtcgccgctcatcatcttcgacgacgccgacgtcgacatggccgttaacctgtcgaggcttgccgtcttcttcaacaagggagaggtttgcgtggcgggatcgcgcgtgtacgtgcaggaagggatctatgacgagttcgtcaagaaggccgtggaggccgcgcggagctggaaggttggagacccgttcgatgtcaccagcaacatgggccctcaggttgacaaggaccagtttgagagggtcctaaagtacattgagcatggcaagagcgagggagcgactctgctcaccggcggcaagcctgccgccgacaaagggtactacattgagcccaccatctttgtcgatgtcactgaggacatgaagatcgcgcaggaagagatcttcggccccgtcatgtccctcatgaagttcaagacggttgatgaggtgatcgagaaggccaactgcaccaggtacgggctcgccgccgggatcgtgaccaagagcctggacgtcgccaaccgggtgtcccggtcggtgcgcgccggcaccgtgtgggtgaactgctacttcgccttcgacccggacgcgcccttcggcgggtacaagatgagcggcttcggccgggaccaggggctggcagccatggacaagtacctgcaggtcaagagcgtcatcaccgcgctcccggactcgccatggtactgagttgagccagggaccgatggaaccccatcgatctcttcttgtgcagtgtacatgcgtcatgcgtgcgtgctcacacagctgggttgctgctttgtgcttgtgttcgtctctggtttgtggctcatgtgtgttagtctgcaccctatccttctgtacgtagctgccggacatgcaaatagtatgttaagtacaccatataaactcttgttttataaattcaagtttagcttggagccttcactccttcagccttggacaaaaaaaaaaacaaataagcggaaaacc

SEQ ID NO: 5286 - DNA, 1304 bp, Zea mays
  misc_feature (1278)..(1302): n is a, c, g, or t
ctagttctagaatcgcgaggccgcccttttttttttttttttttttttttttagaaaaacccaaagtgatactccctctatttttatttatttggcgttcccaccacgaaatgttatcttgctctagtgcaactgtcttgtatgaaacatgatttaaaacccttagtcattgatacatataaaaatgcactcttgaattataggctaataataataggcattaccaagggtactccgaccatgaaattgccacttccaattcagcgccattttctccaacaagtcgttccgtgtgctggccgttggtcgcaggattgaactcaaggacccctccaacaatttcatcgccggaacagcgatgcaggtcaagctcaatcgtcagcggcatgtgcagcggcacggcgagcgcttccctcgccaactgaatcagcccccccggtcgcacgctcactccattgtcaccctctttgtagaagagcacgcagccgacgtcgaacagcttgctgcgagcaacgatcctcccgagaatggcggtggcgtcttcttctccagctttggacaccggcaggcgagcaagtttgacggcgacccggccttggacgccgttgctcaggacggcatagatcacttcagcggggccatagcccgtttggacagtctcgactatggccctgttgtagttggagaagtcgtcgccgatgcagtcgcagattatcctcccgatgtcctcgtcgtcctcagcggcttctccggcttgcgggctgccatcatggaggtagagggtgaaggcaattggactgtatgccgaggtggccaatgatggcccagttagcacgaggttaccctggctgtcgcaggtttgcttcgaggtgtcttcttcctcttccagtggactccagctgtaaatgaaatcgctgcagcagtggccgccgtagaaagagatgatgccacggggcggcgggtctcctccggcggtggcggggatgcgcacggcgaacacctccgccatgtcgcggccatgtctgggcagctcagcgtacgccagcagttgctcgtcggttggggcgtcgctgtagccggtggcggccgccatgtcgccgaggaagagaacgcgattggggactgggaagtgggaagagaagacagggatcgattgggccaaaatgtgatttttctagtcgctcgcccccctcagctttcctgtgccttggaggagtggaggactggctgacgaaggctttggcgatggcgtttagggtttaggatctacggaggggnnnnnnnnnnnnnnnnnnnnnnnnntt

SEQ ID NO: 5287 - DNA, 2269 bp, Zea mays
  misc_feature (2212)..(2216): n is a, c, g, or t
attgggacctcgaggccggatcgaccaattcatccaatagtggatactttgtctccaagtctcaaaacccaattcgacccacttggaaccggccttgttccccgttggatccagcctaataaaattccccattccaacacacacagatctcgcatcccggcagtggcgacgaatctcgcggggcggaggtggtggcgcgacagaggcggtgtcgactccgacgaactcgcagccaccggtggatacgcaccagcagcaccggcgcactccaccgacgttcatatttaaggacttggtttggatagttctactcgtcaacaaaagtgattaaaaatggtggttcttgcagcttcaatcgtttcaaagtcggggaaagcacttgtttcaagacagtttgttgacatgtctcgcataagaattgaaggattacttgctgcgttcccgaaactggttggaactgggaaacagcacacttatgttgaaactgaaaatgtgcgttatgtttatcaacctattgaaggattatatcttctacttatcacaaacaagcagagcaatattcttgaagatctggacacattgaggcttctctccaagcttgtgcctgaatactccccttccttggatgaggacggtatttgtaaaacagcatttgagattatatttgcttttgatgaagccatctctcttgggaacaaggaaaatgtgacagtgcaacaagttaaacaatattgtgagatggagagccatgaagagaaggcacacaagctgatgatgcaagccaaaatcaacgaaaccaaggatctcatgaagaagagggctaatgaacttgacaaaatgaggatggaaagaggcaagcttgacaaaggaggatactcatcaatatctggtccacgcgtgattgaaaaaacgtttagtgacatgagcatcagtggttctggatttggtagtggttctggattaggtggactgagcactgatatggactcatttgccagcaagcccaaaggtcgtccatctacagcagctactgcacctggtaaaggttttggtatgaaattaggcaagacacagaagacaaatcaattcctcgagtctttgaaagctgaaggagaagtcattttggaggatgtacaaccaagtgcagtttctacaagatcatctgctcttccaccaagtgaccctgtcacagtgaacatagaagagaagctcaatgttgttgttaaaagagatggtggtattagtaactttgatgttcaaggaacacttgctcttcaggttcttaatgatactgatgggttcatccatttgcagattgaaagccaagatatgcctgggcttagcttcaaaacacacccaaatatcaataaggatttgtttaacagtcagcaaattttgggagcaaaagatccaaacaggccctttccgagtggtcaaaatgaaactcctctggtgaaatggagaatccaggggatggatgagtcgtctttacctctgtcagtcaattgctggccgtcagtatctggaaatgaaacctatgtgaacattgaatatgaagcttctgagatgtttgatctgcacaacgttgtcatatctatacctctgccagcacttcgggaggctccgagtgttagacagatcgatggagagtggaagttcgactcaagaaactctgtgttggaatggtctattctccttatcgatcagtcgaatcgcagtggttccatggaatttgttgttcccccagctgacccatcatcgtttttccccatctccgttggattttctgcatcgagtactttcagtgatctgaaggttactggaattcttcctctgaaggaaggcaaccctcccaagttttctcagcgggctcgtttgctcactgctaactaccaagttgtttaacgcttgtaccgcgagtgttggtccacttgaatgctccaatagcagatgttattgccgtggacttatgcaagccatggcacgggagattattttgtgtttggaaaatttcttgactatgcgcttctcattgttatagcatattgcacaaatgttgttctaatgtattgccaccagagaaataagtaatgttcttgcattttgttggcatgcaaaaaaaaaaaaaaaaaaagcaaccgcccttggttttgtaaggacgatgttatcgtctgggcttgtgtaatgtgatctgctggtggaaaagcatttnnnnnggaacccttatcccttttataataactaacaaggaacaaggtcatttcccttt

SEQ ID NO: 5288 - DNA, 1188 bp, Zea mays
tatgtcaatttcaagaatattacattagcatagccataaaatactcgtcgtaactgaattcatgtacagacacaagaatagccacaaataaacaccaatccaaacaccgaattctcatagacctacaaggtcatagccaaacccacaagaagcactttttatgttaagttcacatctttaattgagttctcacaatcacttcataatatgtagctttcctctacacaagaaacaattgcaatggctgctgccccccggaccccggtgacaggcacaaacatgcacagcaaaaaacactatgtgcacatcatgccttaccttatgcaagttggtagggtgaaaccatggcacacgaagactagaacgacatatattattaccaggaggagaagtatcaatgcggccgtgagtttgacatttctccaccaaacagtgtttctgaaccgccgagcttgtctcttgaatcgaactgtatttccttgcatatttgcagtcttgtcaaccagcagttccaaacgatcacctctttcaagaaccttatcaatgttatcaatcataacactacggacctgattgatttcacctctcatgcggtttattctatctgcactagggtcatttgaatagtagtccatttgctggctcaagacccttgagaattcatcattcattgcatatgcaagagcggttagcgcagcccggccatatgtcttgacaaaccttccatgaatatcctccaaaaatgcgaagggaatccgtcttccggcggcgtcgtcggccatgcagagcgcggtgatgccgtcggtgcgcttggcgtggaagacgtagcggtcctgcgtgtaggagacgtggctgtcggcgccgccgtcggggaggcgctcgaggacctggcgcgcgatagcgcccgcgttggtggctgccgcgctgtgctccgccagcaccaccgtgccgcgcgccaccagcgcgtacaggattgccatctcacctgttcccttggagccgatcccctcccctcctctcctctcccccggcggcggcgtctgccgtgtggactaggagaggacggagaaaaggggagaggtttgggctcggttgggccaagatggagacggaggaggaaggacacgcccgagctggttgcctgcctctctgccagcctattgtgttgggggcccggccggcctcgag

SEQ ID NO: 5289 - DNA, 2945 bp, Zea mays
  misc_feature (1845)..(1845): n is a, c, g, or t
tttttcctggaggaggagagggtggtcaataagatcattagcagtgtgccaaagcatttgaagcaaattatggtagcgataaagaccctccttgacgtgtcactcattgtcgaaggccttataagtcaactcaaggcgacgaaggatgcaaacaaggaaccaccaacgtcgctgcagcaagttgaaatattgtacctcacggagaaagagtgtgatgtgcgacgaaagaagcatgaagcataaaaccactctagtggtggcaatatggagggtgtccctgttctaggggacagcgcatccaacaaggccatgaaagcaagaacaataaagcagaaagtctaaacattgtcgcattttaatagttgattctactgaccatgagcactcgagtctcgacggggttgcaaactgacaaaactagttgcaagccccagtacaatttaccaaatatcatcgtctaataattagccagaaaccatatggttaaagcttattcagcctcggcaacaaacaggtgtcaaaaggcaacaaagggttctgttgtagtgacaagaaaatatctcctataggaacccgtcataccaaggttcactgcatacataattcatcacaacttgctgtacataattgtttgaatcaaccatctagaccgtctaccatcaaataaaaaaaaactccctaatcattgtgcagttgaaagcaatagttgctagtatcggagtaacggaagggatggcaatgttgctgtgaatctgaaagttgctgactacgtatatatgcacattcatacatcaaaacctggcatcgcaaactgtgacgcaaatgcctcaacctgatttcggagttctataacatcattattgttctgtaggcctcttagaaactccttttgcactttgccatgttctttcagaacattgttagcaatttgagtagcccttatgaggaagtctgcaatcacctcgaagtcctcttctaagcaacctctagtagtcattgcaggtgttccaatccgcacaccacctggcgatatcgagccattatctccataaattggtgtcttgttgacagatatgtggcatgcctcacaaaccttctcgaagatcttgccagtcaagccaagagttctgaggtcccaaagtaccaagtgattatctgtgccacctgtaaccaatctgcattttcttctgatcaaagctgatgccaaagcctgagcatttttcttgacttgttgaatgtatgctttatattcagaagttgctacctgcttcagagttatagccaagccagcaatatgattattatggggccctccttgcattgaagggaaaacaccaaaatttatcctatcctcgaagtcatattcattctcatctccttgagaaaaagatccagctcgtttccttaaatttttccctttcctgaagaatattataccacctctagggcccctaagattcttgtgagtagttgacgtaacaacatcacagtagtcgaaagggctacggcattcctttgctgcgacaagcccactgatatgtgccatgtcgcaaagaagcaccgcaccacacttatcagcaatcaatctcatccgtgcaaagtcccactctctggggtaagagctcccaccacagatgagaattttagggtggaaatccattgctctttcttcaagcttgtcgtaatcaatatacccagtctgtgggttcaccttgtacgacatgctctcgaagaaaatagaggcacctgacaccttcttgccactgggcgtgtagtaaccatggctaacatggccgcccgacggtggctccagccccatgatgcggtccttgggttgaaggagcnccagtgtagacagccaagttggcagacgtgcacgagtagggctgcacgttgacgccccagcaggcagggtcgagaccgaaggcggtgagagcgcgctcatggcagagccgttcgatggcgtcgatgtgctgattcccgccgtagtagcgagcacccggggccccctcggagtacttgttagtgaggtggctgccgagtgcatcgagcaccgcgcggcagacgaagttttccgacgctatgagctcgatgcctcgcacctggcggtccaactcctgctccatcagcgagtgcacgtccgggtcggcctccgccagcgactgattgccccaggcgcggaccgcggcgcggcgggtctccagatctgcgccgctgccctcccccgtcgcctgtcgcttggcagggcgaagcgccgcggacgtggacgagcaggatgacgtctctccgcccccgccgccgttgccggcgcggcgcgggcgcttgacgaagagggagtgcccgaggagggagaagtgctggtcgcccccgtcctcgtcatccctctccgcgtcggcctctccggccacgacgcgctccggcttcggctcctccgcgtcgtcgaacaagcgcagcggcgcggctaccgcgtgcctgcgagcgtgggcgtgggcgtgaccgtgagagtggagcccgagcgagaggtccgacgatgtgggccgcgagagatccatagcttaccaattctcgaaccgatcagcgagaaatcgcgaaccctaaagagctacgcgtcttcaacaacggcagcaactaacgcgacagcagcagcggaggtgggcgacgcagggaggaagcagagtcagcagcggtggctactagaggcgacgcggcggcggagaaaaccatgggccttagggatcgatcggggtatggggtccggatgcagagacgacgcggtggaattggagatctcgtggaattggggagccggaggcaagcagcggagcagaggggaatgaacgggcgccgtgctccaattgatgaaggggagggctggtggtggtgtcgtgtgacgtggtcagatactcagatgcggttcgatgggaacccgggataatgggacgatc

SEQ ID NO: 5290 - DNA, 2715 bp, Zea mays
  misc_feature (16)..(23): n is a, c, g, or t
  misc_feature (2170)..(2196): n is a, c, g, or t
  misc_feature (2289)..(2295): n is a, c, g, or t
  misc_feature (2607)..(2607): n is a, c, g, or t
gccggccgggccgggnnnnnnnngccggccgggtcggcgctgcggagagtgtctcgtgctgctgcttccgctgcagtaaaatacggggaagaggaggggagggagacgcggccgctgcctgccgcacatgctttaagtcccactccccacctccccagatctccgccctcctccccaccgcccccattcctcccctcggccgcaaccgtagccgccgcactacggagcaagatcgtcgggtagacggacgggcgggcgggcgggcgcggctctgtatctatctgtcggtgggagaccgcgtgtgtcggttaggcggcgggtggcaaggaagaatggcggcgagcggcagatccgtcgcgtgctgtgccgccgcgctgctcgcggccgcgttgctcctctccgcaccgactgcaacagaggcttatgattcgctggatccaaatggcaacatcaccataaaatgggatatcatgcagtggactcctgatggatatgtcgctgttgtcacaatgtttaattatcaacaatttcggcatatcggcgcacctggttggcagcttgggtggacatgggcaaagaaggaggttatatggtcaatggttggggctcagaccactgaacagggcgactgctcaaagttcaagagcagcccaccccattgctgcaagaaagatccaacaattgtcgatttacttccaggcactccatacaacatgcaaattgccaattgctgcaaggcaggagttgtaaatacctttaaccaggacccagcaaatgctgcttcctccttccagatcagtgttggtcttgctggaactaccaataaaactgttaaggtgcccaggaacttcactcttaagactccaggccctgggtacacatgtgggcgtgccattgttggcaggcctacgaagtttttcaccgcggacgggcgcagggcaacccaagctctaatgacatggaatgtgacctgcacatattcccaatttcttgctcagaagactccatcctgctgtgtatctctctcatcgttttataatgacacaattgtgaactgcccaacatgctcatgtggctgccagaacccaagtgggtcaaactgtgtgaatgaggattcacctaatctacaagctgcaattgatggtcctggcaaatggactggtcagccccttgtacaatgcacttcccacatgtgcccgataagaatccactggcatgtgaagctcaactacaaggattactggagagtgaaaatcactatcacaaacttcaacttccgcatgaattacacgcagtggaacttagtagcccagcatccaaactttgataatatcactcagttgttcagcttcaactacaaaccacttactccatatggtggtggcataaatgatacggcaatgttctggggtgtaaaattctacaatgatctgctgatgcaagccggcaaacttgggaatgtgcaatcagagctgcttctccgcaaggactcccggactttcactttcgaaaagggatgggccttcccacgccgagtttacttcaatggtgataattgtgtcatgccatctcctgaaaattatccatggctgccgaatgcaagccctctaacaaaaccattggcactcccattcttggtattctgggttgccttggctgctctgttggcttatgcatgattagtgggatcaagaggtttagcaagtttcaagttgatgtcagattccatgaggtgcactgcaacaagtcatttgttcattcaattccatggttgcacagaaaagatgaggcgatgccaagaaaaagtcgatatgtctatgtgtttaagttaaagggccaaaatgtatttcttgtttggtatataacagccctacaacactttggtgaacttagttactgcagattaggtaattacagttgcaccttttgtattttatagcaaacccagaatttttcattggattctacgactgcccctcttgtagtaaatgcaagcttccctgacccctgtttactaaaaaaataggggcttgcccgggatcgacccaattttcagtgcaggactccaacttcatcaggagtccaagcccacatgggcctggtgctatgacaagaaaaggcgctaatactgttgatagacaaaattctgagatttcttattatgctgatnnnnnnnnnnnnnnnnnnnnnnnnnnnactaaaaggggtacatttcgtcacaaatttctaaggatgctgctgccgttctggtccagtgcactgccaacgctaccagtcacagcaccatcnnnnnnngagagtgatgctctagaggggagtcgatcacgccatcagagatcatcaagaggtttagcaagtttcaagttgatgtcagattccatgaggtgcactgcaacaagtcatttgttcattcaattccatggttgcacagaaaagatgaggcgatgccaagaaaaagtcgatatgtctatgtgtttaagttaaagggccaaaatgtatttcttgtttggtatataacagccctacaacactttggtgaacttagttactgcagattaggtaattacagttgcaccttttgtattttatagcaaacccagacttctncattggattctatgactgcccctcttgtagtaaacgcaaggcttcactggtactcctgtttaaagattggtcaaatagaagagacgacggtgattgtctgattgaggt

SEQ ID NO: 5291 - DNA, 1827 bp, Zea mays
  misc_feature (1799)..(1799): n is a, c, g, or t
tggtttctagttaaaaatgcatttggcagagaaatatatatagttgttgtaactcagctgtttgaattgttcttattattttaaagagatctctgctctatatagtttgggagcttatgccagggattaaatcatatatgccacttaatctattgaaacaatcctgtgtcatcaacaaggtggtctggagatacgtgatacattgtatatatggcatgatgcaaacattcagtgtcacataagaatattgaagaaggtttaaaatgcctctatttcattgagtcagaagtatcatgtgctactccacattagagagtagcatgaaataaatagacagaagttcatagagaagggatgttctcgttttcccttgggatgaggcgagggtttgcatgctactgttctgttgattatgccttgttctctggttctgttcaatgtaggacttataactactgtcactttcaaccgtctacttatattttgcttccatcttattcagagctttccacaaatacccatttcattttctttgttggcaattagttttgacttgaccatgttattcttctctacttccaggggatgtgcgtgcgtgttctcgtgccaagccggggcgaaggtaccgagcatgggtggacagactttttatcacacagactggttcagatagttgggtggggaggtttgacttgtgggaatcagaaggtgatgtgcgtgtgtgttctctgtcaagtcttgctttgattctgaaggctgaatccccagagggctttgtgctaacccacatccaaaagacatggctgaacggatactcgtcaggggttgagcaggcgtttaagctgtagagcagtataccgtctcggctcgtggttggagttttcttgagaatagaatagaataatgtacctgtttataatattaacttcccaaaacagcactggaggatcaccagggagaggattcggtgccttctcctatttggcgcgtaagataaatgttttgtctcatggctttcatgagaagatgaaattgactcatcttggtatatatttacaaatcttgaataatgcagcgttatctaaaaaaaaaaatgtcaacggcaatccagggaaattgggtttttacttcattactcattaatgctttatttggttagaagatgattgatggagaaattagtttatttccctttcatttcactccaatcctttctaaccaaataaaccacaggtatgttaatggagaacccttaaatttatgggggatctatatgcctaatatgcaaatataatttaaagccatccccaatctaatgtattttgtccaactagcaaaccttgtgccatataagtgcatatatagtacttcctgttacgtttgttgtgtgtgttctactatttgttcatatagtcttagtcaatgcatgtgttacatttaacacataacctgtgggtatccaatacctacatataggcataagtatagacatgaaatcacgcctatacatggttaggtgatacctattgagtatatgaacgtgttctcattcctaggtgtatgtcatattctcatgactaccgctatgataggcagcccgtagaattataaagatgttgcaataataaattttattcaatgtagtttatttctctatacttcgtttgggtttattcgtttctcaatatatggcacctatcgtttgtgtgtgctcgttaacatcacctgcaatcataattcataaaccttgtgtcatataagtgcatatatagtacttcatgttacatttgttgtgcgtnttctattatttgttcatatagtcttagt

SEQ ID NO: 5292 - DNA, 925 bp, Zea mays
  misc_feature (919)..(919): n is a, c, g, or t
gggcgattgggttcctcgaggccggccgggttggcaaaggtcggggcagagaggagaggaagcagcgagaggagccgaggaagaatatatccatcctaacatccacccacccacacaccagacacacataccttattctccgccgtttcttggcctccggaaatctcctcccccaagttgcaagcatgggcgggttcagcctcagcggcgctacaggtctcgcggcgtaccgcgaggaagacgacgaggagctgttcgagacgtcgtcttcgatctccggcgactccgacgatgagggccaccagctctccgatggagaggggggcgcctatgatttgtcatctgtgatggcacagctccctgtcaagaaagggctatccagatactacgacggcaagtcccagtccttcgcgtgcatgtctgaagtgcgatgcctggaagatctgcgcaagaaagagacgccctacaagaagatcaagacatcaaggagtagcgtcgcgttagacgaagagcaggactgtcatacgccgggtcgtacgaacagcagcagagcgcccggaagttgttgcgcaaacctggtggctcggaacaacggcaaaaacatgctgtacagacctcccccagtccctgtaaacaaaagtggataccgtcagtaggctctaggacattactggatgatatctatccagggtttcacctcttgttttttttccatttttgagggattttgttgacaggcgtattggcctgtctcagatgtaatgtaagagggtttccttctctgctcttagcagagttatctcctatgatcttgtccatgagacattggttcgtgtaaataatagtgatgttgtaaccaaaaaaaaaaaaaaaaaaaaaaaaaataagggggggccccggccccgtgcccccctggggnaaaaaa

SEQ ID NO: 5293 - DNA, 4236 bp, Zea mays
  misc_feature (54)..(54): n is a, c, g, or t
  misc_feature (340)..(340): n is a, c, g, or t
  misc_feature (494)..(494): n is a, c, g, or t
ccttcatttatctactttgcgctcccagcgatttatccatggtcatgttcatgnccagggctaacatccgttcaattttcccacttttttcctcctgtttttttcttgccttttcattttcccttttttgtatatgctgagaaattcgaccaaaataaaatacataaaaatatattggataaattttatgtacattccaaaaaaatacgttagacaattataactttcgtgtacatgctatgtcatttgtataattttattgtgtaaagaataaaatttggaaaatgaagacaagataacctaaaaaagaaaataagaaatagaggataagaagaaaaangaaaaacatgggtgtttgaaaataaaattaagaaaaccatcaattagagtaaaataaataaataaataataaaatttaaaatataagtaaactgaaaaataaagcaaaggatcaaataatataaaaaatataagaaacagagccatgctaagangagagaaggaagctatgacctgcgttgatgtctcgatgaaagaccacagcaactgcacgtgatttcgtgttggttacgtagtgggccacgcttgcacatttgaagtgggccacgctcgcgcttatttgggctgccttccgcgctgctggtcggcggacggcagggtgccgactggtcgcacaatccgacagtcgccgccgatgattcgcgtgcgatcaactgcacattgcatccccgcgaaatctctggccgatgggtccggatcttggttacaggcaggtggtccccagttatcgcgttggatccccctggccaatccgggtcccgctccggatcccatgctcccggtgcgcagagtgccacacacgctacacgaaccataacctctgctcaccccttgacgcgtgtcccggaatacctggtccctcatccatgggcctcctctccaccaccacagccccacttatacaccgcgccgggtccacatgccatcttttatttttcgttattgtagcactggtccaacctgtcagaaaagattggagtagctgggaggtcacgagtcacgcacggatgcgaatcttaaggccatgcgcatgctaatgcttgccctaatccgaatggccgctctcataatacacattaattaatcatgaatgcgctgcaaatttgaccatcatgcgtggggccacgcgcggtcccacgcgttaccaagctgggcaaacgacaacgcgccctgggccgtcggatgcgcgcccggcgcgtagattaatgcggcgggccccgttacagatcagccgggtcccccggcgcgacacgggtgggcggtggccccgcgcgttatggtcccaccgccaagtgacacaccgcctgataaatctagctctctcgtccggggcggcgagccatgtaaaaccgtccgacgcgagccccacctccgcgctcgcacgcggaaggagagggacgagcgagccaccgtcaccgagcgcggttacaagaaaatccaatctctcccccacgctcgtttcgactcgcgccatggaggcgcaggcgcaggacaatagggcggaggatggggacggcgcgcggcaacacgtagccggcggcgtcgcggcgacggggatggctatgggcgcgatccccatgcacgggttcatggtcccgaagccagagccggtggagttcttcggcgggatggccgtggtgcggagcaagccgccgccgcggaaccgcgaccggcacaccaaggtggagggccgggggcggcggatccgcatgcccgcggcgtgcgcggccaggatcttccagctgacgcgggagctagggcacaagtccgacggcgagaccatccggtggctgctgcagcagtcggagcccgccatcatcgccgccaccggcaccggcacggtcccggcgatcgcgaccacggtcgacggcgtgctccgcatccccacgcagtcctcgtcgtcctccagcccctcgtccctcaccaccgtggtcgacggcgacgaggcgtccgccaagcgccgccgcaagctgcagccgacgcgagcggccgccggcgcgtccccgctcgccaccgccgcgcccgcggcgtactacccggtcctcgccgacccgctcctgcagggcaccggtggagcggccatctcggtgccgagcggcctcgcccccatcgccgcgtcgggcgcccctcaagggctcgtcccggtcttcgcggtccctgcggccggcagccccggcggcggcaaccgcatgattccgcaggccaccgccgtgtggatggtgccccagcctggcgccgcggccgcccagcccacgcaattctgggccatccagcccgcgccgcagctcatcaacctcggcggcgcgcaggccgccgtgttccccgcggcggtgaacgtcgccgacttccagggccagcagcccatctctagcttgtctcacaacagcaactcggagcatctgcacctggggtccgggtcccacgagcagcagcgcggcggtcgcagcgacgtcaaccatccggaggaggaagaagacgacgacgacgacgacgagccggtgtccgactccagcccagaagagtaacgcaccaccgtacgcccagaaagtccaaccccaaagcttaggttccttttgctctaatttaatcgctccccctcgttttcccccctttcgcaatcctccttatgatgaactacatgatgctttctgtcgtagctcacgttcagttcagtgacccccagtgttagtggtagagagaagaagatgatgatgaaagaggtagtggaactgtagaagcagcgtgtaatgcaaatcaaaacgagcagctgatttgttattgagttaattaattgacgaccttttgctaatataattctttttttttactgtgtcgccatttttgtttggtgagcttgagccctcctgatgaggagagtgaggagggatgggtttagcgtactctgctaatcctgctagtgtgctagggatggaggcgaggcggagcggcgagcacgtgcgtacgtggtggcaaaatttaacgcacacggccggaggtgggtccggcggagtgggttgcttttcttaggctccggcggtggggcccggagccggtggttcgtggcgcgggccccggacgcaaagcgatgtggtggtgggtcaaagcgcgcgccctcgcggaccgtgcgcgagcgcaccagcggctggggtggggtggggtgtggcgtgtggggacagccaggcagccacgagctgcccgtcacgtgactggtgggcggaggggggcccctcctcgttgccgccgcgtggtggggctccggcaggcgcggcggtaggtgtggggtcctggacccgctcgcgtcgcggctggtgggcaccggcccggacacgtgttgggtggctggtggtggggcctcgttggcccccgcgtgccgtgccgtgcccctccgctcttcccgccgtagggacccggtcctggtggggccgaggatgctggtgacgtggggccctgcgaatattccacgctggatcccaaatccagttacaggattaacataacaatgaggagggtagggttaacttcaaattaatcagtatcgttaccgtttcgacgaaagaaagaaaaaaagggcgtcggcgtcacggtatcagccgacaagctcgtggtcgtggcggctcccgggaagaaaagagcgtgatgcgcataaaagccggattactgtaaccgcatctgttgtcttgccgcagctgacagaacgagaggggcaagtaccgctgctgctagtcgtgtagcaagcagtgcggagataaaccggagagaaagcttttcccgccggcgagtggcgcacgcccgcgctggcgctgcgctttccgttaaaagcctactcgctgttcagccatgaggtcgccactagcgaggcgaacagagcaggagagcggggcgggggcaggggcccgcctgcctgttggattagcattttgctcgtgcacggaacacggtgcgccatccggcccggatgcttcctcactcgtccggtcggtcggccccgcccgcgatgtcttttcttccccatcgggcccatgcccatccacccatcgaccgcctaaacaaatcattccgggtttcgcccgcgcccgtcgggcgtccgctcttccgttggcggcaggccggcagcgcgagctggcaacgcggcgagccggcgagcggtggctgctggttggtcacgacgatctcgtg

SEQ ID NO: 5294 - DNA, 770 bp, Zea mays
gggtacctcgaggccggccgggccgggaacccctagcgtccactccctcaggtacctggggctcgcccggccggccgggaactcccgccgccgccccttcctctccgtcgctcgcctcgcgcctacgccaccacctctgccatggccccgaagaaggataaggccccgccgccgtcgtccaagccggccaagtccggaggcgggaagcagaagaagaagaagtggagcaagggtaagcaaaaggagaaggtcaacaacgctgtgctcttcgaccaggccacctatgacaagttgctctccgaggtgcccaagtacaagcagatcaccccatccgtcctctccgagcgtctcaggattaatggatcattggcacggagggcaatcaaggatctgatggcaaggggactcataaggatgatctctgttcattccagccagcagatatacaccagggcaaccaacacatgagggctgttttgcatcttgtcggcgggtctctagacggcttaatgttgctattatatcatgtttatttcaatcatggctcagtcagccttactgttgtgtcggatgttggaatatttttagattactgtactgtttaagctcatgttgctatccaaatattcatcttgaggaataccaatctgtctctgctctaatattacaacaattgttaaagttgcgcgtgttgtcatgaattcagtcctattgacatgcgctcaacgaaaaccagaggatgtttcctagggctaaaaaaacccgcggcc

SEQ ID NO: 5295 - DNA, 2270 bp, Zea mays
tgtctaaaatcgatgggaaatttactctaccaccaccacgatcatacgaaacgcggtgcggcgggcacgccgtttttcggttccgcccctgggtacagcgcgatttagcgtgcaccacccgatcccagccaacaagatcccctggaacaagatcccctctcttcctcgcattcgcatcgcctcgattccacccacccacctccgtccgcctccgagcaccaccaaaccctagatctcgcaccggcggcagccatgtccaagccatggggcagcgtcggcgccggcgcgtgggcgctggacgccgagcgcgccgaggaggaagagcgcgagcaggccctgacctttccggcgctcgagccgcccttgcccgcgggcggcgccgccagcttcccgagcctccgggaggccgccgccgcgggcggcgggggcaagtcgaagaagaagaacaagggcaccacgctgtcgctgtccgagttcaccacctacggcgcggccgcggcccagcggcgcgcggcgcctgtcgagcccaagggcctgacccacgatgagatgctgctgttgcccacggggccccgggagcgctcggccgaggagctggaccgctcccgcgggttccgctcctacggcggcggcagcggcttcggcggccccgggggagagcgccgcagcggcttcgacgacgaggaccgccgcgggccgggcagaagctcggatcttgatatgccctcccgcgccgacgaggctgacgactggggcgccaccaagaagtttaccccggctcccacagactctggccgccgcgataggttcggcggcccttcccctctcggccgtgctgatgatattgacgactggtcgcgcggcaagaagccgctcccggcgcgctaccccagtctcgggtctggaggtggcttccgcgactctccagccttccgcgactcaccagctgcttctgattctgaccgttgggtccgtggcgccacccctttgccacacaacggcgagggggcgggggagaggccgcgcatcgtcctgaatcctcctaaacgtgatccgttagttgcctctaccccacctgctgaggtggcccgcaaccgaccaagcccgttcggggctgcaaggccccgggaggatgtgctggcggagaagggggtggactggaggaagtttgagaatgagattgagcacaagaccagccgtcctaccagttcgcactccagcaggccaaatagcgctcattcctcccgccctggtagccctgggtcgcaggtttcggcagttgggagtgaaggagcaccgagggcacggccaaaggttaacccatttggtgatgccaagccaagagaagtggtgctgcaggagaaagggaaggattggaggaagattgatattgagcttgaacatcgtgctataaataggccagagtctgatgaagaaagaaatttgaaagaagaaatcaaccttctgaaggtggatcttaaggaaatcgagagaaacatgagtaatggttctgaccagacatcggtagatgcaaaaggtttgtctgagaagatatctcagttggaaagccagcttgagcagctttcaagggagttggatgacaagattcgatttggacaaagaccacgttcgggtgcgggcagggttacagcacttgcaccaactagtttaggggaggaaccacatgctacagtggtggacagaccgcgttctcgtggtggtatggagccaccaccaaggcaggaagaaagatggggatttcaaggaagcagagaaaggggctcttttggtgcaagcagaaattcggacaggccaatggcaaggcagagatggtgaaactgggacaacaagcatctcttagggatatttccggttcccagtcccttttttttgttctgaaaagatgggcaaaataagtcgttacttatttgtttgtcgtgtttgcttggtctagaagattgttgaggatggagataactccacatgaagttattggtttgtcaactctatgccgtaggatgttttgcgtttccctttttgccatctaccatgtcaaaacgatatcttagcaacctccgatactaactgttatgcttactggattccagttcagcatatgtcactagttgattatttgtgcactgcttagtggaaaccttggatttgcacttttactgatgctatgtcacctttctgttagtgttttttttaaaaaaaaaaaaaaaaaaaaaaaaaaaaaaaaagggaagccgctcgcgatctagaactag

SEQ ID NO: 5296 - DNA, 2518 bp, Zea mays
gcggtccgggcgcggcggctgctgctgctgtccctggcctgctgcagcagcatttggccaggcggacggatcttcgctgctgcggacactgaccccaacgatcttaacgtcctcaacacgctcttcaccagtctgaattctcctgggcagctcacaggttggcaggcgaatgggggtgatccttgtggccagtcatggaagggcattacttgctcaggatcaggggtcactaaaatccaattaccaaacttgtcactcactggaaatttggcctacaacatgaataacttgggttcattagttgagcttgacatgagccaaaataaccttggcggtggaggtcaaatacagtacaatcttcccaatatgaagcttgagaaactcaatcttgcaggaaatcaatttggtggaaatttaccctactcaatttcgacgatgcctaatcttaagtatttaaaccttaatcataaccaactacaaggaaacatcagtgatgtattttccaacctttacagtttgtcagaactggatctgtcctttaattcccttactggtgatctaccacaaagtttcactggattgtcaagcctgaaaaaagtgtatttgcagaacaaccaatttactggtaatatcaatgtcttagccaatctcccccttgaaactttgaatgttgcgaacaaccatttcactggttggattcctagtcagcttaagaagataaacagtctacagactgatggaaattcttggagcacaggaccagcgccacctccacctccatacacagcgccgcctcctcctccaaaccattggaatgctgatggttcatcaagttcatcaagttctggtggaagatctgggataggtggtggaggtgtagcaggaatcattatatcgttgctggttgttggatcagttgttgcatttcttgtgatcaaaagaagaaaacgcaaagctgctatgaaagaacattttgaacagcaccagccattcacttccttcccttcaaatgaagttaaagacatgaagcctgtctacgaggccaccacagtagacatagagtctttggcttcacctgcttcagttaatctgaaaccacctccgaagatagaacgaaacaaatcatttgatgatgacgatgatttttcaaacaagcttgttgcaaagaaaagtaatataacacctataaatgcaactgtttattcagttgcagatctacagatggcaacagatagctttagcttcgacaaccttgttggagagggtacttttggacgtgtttacagggcacaattcaatgatggaaaggttctggcgatcaagaaattagatagtactgtgatgccatttcaatcatctgatgactttgctgaactggtctcgaacatttcaaaattgcaccatccgaatctgaatgagcttgtgggctattgcatggaacatggccagcacttgcttgtgtatgatttccacaggaatggatcacttcatgatctactccacctttcagatgagtacagcaagccacttagctggaacactcgtatcaagatcgcactcggctctgcccgtgcactggagtaccttcatgaaatatgttctccatccatcatccataagaatttcaagtcgtcaaacattttgctggactcagaattcaatccacacctttcagatgctggacttgcaagctttattcctgatgctgaattccaggcagcagaacaaagtgccggatacactgccccagaagtggacatgaccggtcagtacaccctcaagagtgatgtctacagctttggagttgtcatgcttgaactattgacaggacgtagaccatttgacagctctagacccaggtcagagcagtcacttgtgcggtgggcaacaccccagctgcatgacatcgacgcattggacaggatggtcgatcctgcactcaagggtctatacccagccaaatctctatcccgatttgctgatgtccttgccctgtgtgtccagcctgaaccagaattcaggccaccaatgtcagaggtggtgcaagcattggttcgacttgtgcagagggccaacatgacgaagaggatgcttgatggggatacttctcggcgaccagatgacctggaccaagatttcatatgacaagctgaactcttgtcagattgtatttatttcgttcgactagcggcccagcagagacataatcacacaagaggaagaaacagaactctgtcagcttcgccagtacataatcacaagtttttcttggtagcaaagttgtgctatatggttgtactgtgtctacaaaatagtaccttgatcttacgctaatggcatattgttataattctttggtaacttatatgcaaatgccccagataaacaaaactatggtgaagtgtgccgaatgttaaaataactgattagtccagtactgctgcatcaactgaaacaagttgcacagtggaaatatttatcttggtccctcaactaaaaaaaaaaaaaaaaaacaccc

SEQ ID NO: 5297 - DNA, 4376 bp, Zea mays
tttaaaacaacagattttacaaaaaaatattacatttgagagtacgataaatatgtacgtacaaaaatgaaaagtaaaatatgtctctaatatagatatttatgtacagagaacgagatatagagaatattgttagagaaggaggagatatagaggagagaattttttaaataatattataaagaatgaatatagatgatgaatttagagtgagtgacatgttgctgtcgatacatttatgcttctggcaagccgtttcaaagcttttggtcgagcacagccgagcacctgttctcacgcttaccagaaggaccaacgagcgatcgtgttcctcgttcaattccagtcccgtcgctctccagtctccacatcaaattcatgacgattgtccgattcttttaggacgccaagctagctgttcggtgacctgagcggctgagatggattcccagcgattcaatccagggaggcttgccgagcgtcgtttcgatgcaatcgagtgcatccgttgctggatcaggacatctaatccatcataattatagcagtactatcctatggctgccgtaaacgaccctgcttctatttagagtttttttaaaaaaaatatatataatgtagtagattagagacacgatgccctcgttgagtgggtccaactgtcgtgcgactgtttgtatttgctcacacgcctgactctttcagttagggtttggtacgtcgctcgtatccatccacgccagctccaaggcagtaggcagcagccgttctcgtggctccagaccgcgcgatagctggctcgcttggtcagtggaggaagtcaggaaaggaacaagagccagcgtgcgcgcgcacaccaaacgacagcaagagactttgctgttccagattggaggcggagctcggcgcggcggcgctgcagtctgcacgactctttctccagctgcccattttatggtcgctcgtcaaaaggacggcaagtcggcatacgaatacccgttgaatgaaaccaggtctggctgttgcatgttccttgttcggttgttcgcccttgcgcgggagccattaacaattttaccattgtcatttgtagactttatcagtatgtcatccgatttataaacaaatcaaaattgagagcgacaaaatagcaagtttctcgcgggcacgttgctgcaggctgctacagtgcttcctgcctgccacgagcgatgcagtatagtaggtgcaaacaaaacaatttgctagtgtaataaatgacagttggacagcagtgcccaatcccgttacggcctaatttgggtaatttagtaataaaagaaattagagtgaattgtaatgtattataagagtttttgatttattaggaatttatacattctccaatctctctaaaccacttcaatactagatatccaaactgagcacaccggctggagagaaatgtacgaagaaacaccggagtagaactcgatgggagcccaacccaacaactccgctgcagcccaagagcagagaatgccagcccaatcacggttttccttccctctgaccgaccgacgcccggccggcggcggggccccgcccccacgcctctccgcatgacgaaagagccgacgtcactcctcccgatctgggcgcggacgccaacgacgcgacggcccaagtcgcgacgccaccagctccccatcccctcggacgccatggaggaagctcgcgaccacaggctctcctccaccgccggccgccccttcctctctggcttctgcgccgcggcgctccgacgtaagcccctcggcgcccgcgcctccgccgccgccgccgccaccggcgagggccttgtgcggcagctcggcgtcctcgacctcgtgctgctcgggatcggtgcgtccatcggcgccggcatattcgtcgtcactggcaccgtcgcccgcgacgccggcccaggtgtcacgatcagttttgttcttgctggagctgcgtgcgtgctcaatgccctgtgctatgctgaactggcgtctcggttccctgctgtggttgggggagcatacttgtacacgtacgcagcgttcaatgagatcaccgccttcttggtcttcactcagttgatggtggattaccatatcggcgcagcaagcattgctcgcagcttagcaagctactttatcgagttcttggagctaatcccgctcttgaagggccaaattccaagctgggtaggccatggggaggagttttttggtggtgttgtatcaattaacatactggcccccgttcttctcatcatcttaactgcgattctctgctatggtgtcaaagaatcatcagcagtgaacacgtttatgacaacattgaagataatcattgttatagtcattgtatttgctggtgtgtttgaggtggatgtatcaaactggtctccgtttatgccaaatggtttcaaatctgtagtgactggagccacagtagtcttttttgcatatgttggatttgatgcggttgctaattctgctgaggaagccaaaaggccacagagagacctacccattggtatactaggaagccttatagcatgtgtgttgttatacgttgctgtatgcttggtcattactggaatggttccatatacattactcggtgaagatgctcctttggctgaggcttttgctgctaagggcctgaaatttattactgtattgattagtattggagctgttgctggacttacaacaacacttcttgttggcttgtatgttcagtcacgtttgtactttggacttggaagggatgggcttttaccttcagtatttgctgaagtacacccaacaaggcatactcctgtacagtctcagatttgggtcggttgtgttgcagcagtcatggcaggcctctttaatgtgcgtatgctctcacatattctttccgttggcactctgaccggttattcagttgtatcagcttgtgtgatcacactaagatggaatgacaaaggaactagtcgtcgctcccttggaagtatgtcaatttggcaagagggtgttctaagtcttgtcatagttgctctttgtggttttatagtgggactttgctatcgctttaactatgctatagcctttatggttgtagcttttctgatagctgttgctgccagtttcgctctccagtttcgtcaggtctatgtggatccacctggcttttcttgtcctggggtaccgttggttcccattatttctgttttcttcaacatggtcctgtttgctcagctacatgaagaagcgtggtatagatttgtcattcttagtctcatcgctgtgggagtttatgccggctatggtcagtacaatgctgttccttccagctcagaacactctactattggttaccatggcattccttctgaagccgcatgagctatgttcatccccggagttcttcgaacatactgtatggtaccaacatacaccatcgtcaccgaagtttgaacctgttgcttttttttttgatgttttgcacagtgcatactcttgtagttacgcttagtactcctatacctatatctagacagtgaatttcacagcctgtgttgtgcccaccacaccattcgtcaggaagcttgccaagtgcatagaccttgtaaaaatgcaaatgaaaataaagaactgcagctgcattgtttgtaggaactcattgtcatgcactatgtataattctgtgtatattgtgaagagttcatatcaaattgcactgcggccgtcttttgccgttgccctacattcctcgcgtcaaaatcctgggtccccagctcccttgttgctattgggcctcgctccttctccgcgccactccgccaccgcacagcctgccctcgggagcgtttcagcgtggacatttcactcgattttggtgttactgtcaccacactgcccgccagaccgccatgggttggacttccacgcccgtccagtgcggcccttgcattcaatggctagacgcacggcagcgatggtcatgaactcatgattgcagcagagatatacatattgcttgcatgatgtgctgtgttgattgcttccgtctaaaatacatcattcacattgtattagtaactagtaagcatagatcttaccataagtattttattttccctttcaacaacgttattcaattggttagtgtatttgttcaaaaactcatgcttggtgtccatggcaccacatagctcgtctattcttgaatttataaactcactttcattatcactcttcattttcttggtttttaattcaaactcggtttcaattttcttacaaatgatttaaggatgttgaagatttctctcttgtcctttgagagagaaaacctatgtgaaccttaag

SEQ ID NO: 5298 - DNA, 2162 bp, Zea mays
gattcacaggtgcctccagtcacttttaaccctcgggggccgctggtttttggctttttttgtcaacaaagatatttcttttttctttatttcttacaatctatgggcaaatgatttgccaatgtaaggctattctctggagctaaaaaaactttgatcaagatacacagggaagatcaaaatttttgaggttgcaccaaattattaatctaaaatactgcactgcatgtcccacgttccagaaatcaattgcaggccctccaaatggaattaaaatgaagagattagacataggcatgtaagaagctacatgagaagttctatcggaccttcagcttagcctaaaatgcccgtgggcagaagttacccatcaaggagtaaacagactcagcagaatttgccttctttatccttccttttggtcaagatgtacagttgataatgtaatagccctggtatgtcaacaactcatcacagcacaattgtacacaaagcttccggaacggcgggtgccaatgatcttccaatctggcagtccattattgggtacccaggaacaaatttcaatcaccccgctaccaccagcactcattgcaccaattacaatgagcatatctccacaactacggaaagcaatgccccagccatgaactgatgtatacctcccgggtaacaatccaagagtgatccatgcattattttccttgtcatatttcctaacctccttcgttgcatagtcagcagcataaagttcattattcacaacagcaacaagaggtggagcaccacttccaccattaagaccctgtgccatatctgggatcaagcgccaggtgctgctctccaagtcaaactcctcagcacaactaaggatctcattgtgcctctcagatttcccaccgatgacatagaacttgccatccatgaagaaaccagagcacatctgccgtgccctattcatgcttggaagagtggtccatgtctgcatctcagaatcataaagctcagcagagtccaatgtaccgttctggccaataccgccagctacaatagccttctcaccgaagcttgcggagccaaataagcaccttggtgtgttcatcatttctcctgtagtccaagagttagtgagaaggctatacctcagcacaacatgggcttccaccctcttcccaaagacgaggatgttggtgcccacggccagggattctttatcagcaagtgtgaagcattctatgggaggcatggaagggatgctgaaccaccgttggcggcgcggatcaaaaccttcccactcgagaacattgcatgagcagtagatcatctgctcgacgatcccagcctcacgcctcaacctgtaaagctccccaaacctcacaagggagtagaaagatcgattaacacatgccacatcataatagtaagaccggggaagacggagcaggcatgaaatggccaactccctgccgatcccgccgatgaggtcgcccgtgttgacttctccaccctcatcagaaccctccatctcggaggaccaggctctggctgcaagattcctcgaaccactgccggtcttgttcttcttcttgctataacaattcaccagaccctccacctgtcctcccttctgcgcccaccccacctgcaggcggtcgatcacgcagctcctgctcacagaaggatcctcttcagcgcgggtcaaatcaggggcagtgcttgatgaggttgccgagtctaagcccagtatcatgcgctggtcccccaacatgacctgagcacccttcggatttcacagcgaatctaccgtgatcctaaaggctgcaccaatcctccggcagccaaatccacagaaaccagcaggaaaaccagtcgcaggggcgggcgcagttaagggcctgggctgggtgtacacatgtacgcctggtgcggctcgtcgccggcgaaggggccgaagaagacctgccgaagggcccgacggggactgggcggcggcggctgccaggggtgcgggcgcccagtcgtcaccacagaggagagagagagagagagagagctcacgcggcgaggggaacgggagaagagaagaggcagggccgcagcccgcagggacaaacgcagaccggggtccgggtgtgtcgcccggcccctcgagggacccaatg

SEQ ID NO: 5299 - DNA, 1234 bp, Zea mays
aaaacacgactagagtgggtgggagactgggaaagacgagacagcgagacaccactgagacgagagtcagccggcaggtgagacatcgcaggggaaccagctctcaagacggccgacggccggcttgcctacctgctcccatccttcccgagggaccgagaaagataagaaaggcggtggtcaacttgtgtcctgaggtgcccgtagaagcccaaggacaagaaacaaggagaagagtagatctacatctactccaccgatgagcgcgtctcggttcatcaagtgcgtcaccgtgggggacggtgccgtcggaaagacctgcatgctcatctcctacacatccaacactttccccactgactatgttccaactgtgttcgacaacttcagtgccaatgttgtggttgacgggagcactgtcaacttgggtctgtgggatacagcaggacaagaagattacaatagactgcgtccgttgagctatcgtggtgctgatgtttttctgctcgccttttctcttatcagcaaagcaagctatgagaatgtctctaagaagtgggttcctgaattaaggcactatgctcctggcgtgcccataatccttgttgggacaaaacttgatctgcgtgatgataagcagttttttgttgatcaccctggtgctgttccaatttccactgcccagggcgaagagctgaggaagctaattggtgctgccgcctacatcgaatgcagttcaaaaacccagcagaacataaaagcagtgtttgacgcagcaattaaggtggttctccagccaccaaagcaaaagaagaggaagaagaaggtgcagaagggatgcaccattttgtaactacaaacggtagagggcaacagtctggctgcggcgctgctgccaatgataaccatcgcctccttgctgtataatatatcgcctgatcatgccaccagcatgcacaagggagatggtggttttaggatccttgtcctactgtgttgtgtagaccaccgggtgtagttgactgtatctggttgtttgtatgtatggacaagacaaaactagcactgcagatggtatggtaaggcgtaagcaaatacaatatgacactggtccagttccaggaatgaatggaatatgacattggtccgagatttgcaataaaaaaaaaaaaaatcaaccaaaaaaaaaaaaaaaaaaaaaaaaaaaaaaaaaaaaaaaaaaaaaaaaaaaaaa

SEQ ID NO: 5300 - DNA, 2704 bp, Zea mays
  misc_feature (1698)..(1698): n is a, c, g, or t
aatatagaaatggaaaagataaggcgaacgatgtccacctagaaaccctagttcgaacgcgccgccgtcaccgtcgtcgctcgcgctctccgcccggatcggagcgagagtaggggcgtgtcggcggtgaaagcgactgcgtcagccatggcggacgaggagcattcggagaggagagaggaggcctccgagcttgcccccttcgacccgaccaagaagaagaaaaagaagaaggttgtcatccaagaaccttctgatgaagtggacaagcttgcagagaagacagaaacactggcagtcgcagaacccgctgaacttaacttcactggaatgaagaagaaaaagaagaagccggtggatcttgattcaactcttgatgagcttggagatggggaggacactcaagatgatcaagctgtagaggaacaaggggaaggcattgtgctgggaagtgtccctacatacccttgggagggaactgatcgggattataaatatgaagagctgctggacagggtgttcaacattctacgtgagaacaacccagatcttgctggggataggcgtaggaccgttatgaggccaccacaagttcttagggagggaacaaagaagacagtttttgttaactttatggatttgtgtaaaacgatgcataggcaacctgagcatgtgatgatgtttttacttgctgaaatgggaacaagcgggtcacttgatgggcagcaaaggttggtgatcaaaggaagatttgcccccaaaaactttgaagcaatcctgaggagatacatcaatgagtacgtcatctgcaatggatgcaagagccctgataccattctgtccaaggaaaatcgtctgttcttccttcgctgcgaacagtgtggatcttcaaggtccgttgctccaatcaaagctggattcgttgctcaagtcggtcgtcggaaggcatgagcatctatatgtggatggtgttggggtcaataccaactcaacaatagttgattatttgttgactagagattctgcggcgcaatgttgagcaagatatatcaacgatgccctttgtctgcattcaaaggattcatctattgatgtcacaagcctatgaaaactggcgagtgtgaatcctgatctacgactccctgcgatcataatcctgtgactgctggttagtgtcaaatgcagtctgttaaacttcttgatgcggtcactaatacaagttcatcaaagttttgtccgaatgccataattctgtcataaaatttactttctctgtaatacacaatgaatctaagtgtttacttcattattcgatccttggaattcagctgattcattcaaacaaacattctctttagcttcaaaagcatccaccaattaaagctgccatccgtatcatttaacaagtaaattgtgtgaaactgcaaattaataaactcattcaaaattttcatttgacgcgtgcataactgaggaaacctcctcttaatctgctaatcagtcgccgataaaatattatagaagattcggattatatgtgtttttctttctcttagttagtctttggttgcacggtcttacgtagtgaaccgggctgcatgtttggtttaattcagatggaaccgagccatttcaacagtgaaatattttttttttaatatgctgcatctttggttccctaaaaacgaccaaacatgngtgctcccgagtccaacactcttatcgtttttgttagtagccttctcttttgtttcaactaggctccaaacactatcttaataacacactagtacacactagtataatgcttatatgttgcgaccatacacaatcatattggatacctgccaacagtgtcacggacgagagcctagtaagccgctgtagcgcctgatatgagcctcgtggagaagcaatctgtagcgtctggtatgagcctcgtggagaagcaatgactagtccgcctggtatgagcctcgtggagaagcaatggctagtccacggtgctcgtactttagcgcttggtactaagacctcgactcgaggcattttctgtaccccttcttaccctgaaacttatcccttataacttgaatttcgtgagtcggaccttggaaagtttttgaataaacaaggggaatttgtagatcctccaaacgtagagcgtgaaaggctttgaaaccaaatacgttatccactatggaagtaaacatgttacagtgaattcaagatttataatgtttcagactcaacgtttatactttcagtctttggtggcatacgctatcggcacataattgtttgtaataggggttataagcgggcgagagatagaagggtcccaagtctctaaggattgttctgctagagggcctacatatcgaatgttggctctcgagttcgtctctcttctttcaatccgaccccctcccccgcattttatagcctaaggatggggtggttataaatgactttttctcagaaggatttgttgtgctgtaaaacaaaatagtttcccctggataaaccccttatgtgtcgttattagtcttgtataactctccatcgtgcctcctcaggactgctagtgaagcgtgccgatgacttgagtctgagcgtcatcattatttcgcctgtgtgcctctacccacgtcgacccttggtctaagggcatgtacagtggagagacaccaaaaacggttct

SEQ ID NO: 5301 - DNA, 2345 bp, Zea mays
attgggtacctcgaggccggccggggtgaaggagtgcccctctcgacaggctaagcttttactcaaaaacgcgctgtccccgccggcccccctgtcaaccttttttctttgagaaaactcggccccccgcaggatcttttgttccggaccccgtgagtcgctgccacgatcgaggcagggcgccaattgcggtggccaccacttccaatccactccccgcgttcgcctcgccgagctgttcttgctctgtcctctctccaactccacgatttgttccacacccggttcccgagcctccgcagcgcttcttgctgaaaaagggaactccgagttctccagctctggatcggcagagagcggtggttccttttgcggactctgaggtccagttcttgtttttgatttgtctcatcaacccaccagtcgggctgcaggcttagagctggaaggaataatttgactagagaaatggggcagtgttgcagcagagctacggccccggactctggacggggaggtgccaatggttatggctattctaaccaggcaaagccggcgcaagcacctccgagttacaaccctcctcagcaggcggccgaggtgaggtacacaccatcggcgacgaactcttcggcagtcccacccgtggctgtgccgccgaagccaacggcggacacgattcttggcaagcagtacgaggacgtgcgctctgtctactccctcgggaaggagcttggccggggccagttcggggtgacatacctctgcacagagattgcctctggtaggcagtacgcctgcaagtccatctccaagcgcaagctcgtcagcaaggcagacagggaggacattcgaagggagatccagatcatgcagcacctgtctgggcagccaaacattgtcgagttccggggagcatacgaggacaagagcaatgtccatgtggtgatggagctctgcgcaggtggggagctcttcgatcgcatcattgcaaaggggcactacacagaacgtgcggctgctacaatctgcagagcagttgtgaatgttgtcaacatttgccacttcatgggtgtgatgcatcgtgatctgaaacccgagaacttcttgcttgcgaccaaggaggagaatgcaatgctcaaggccactgattttgggctttctgtcttcattgaagaaggaaagatgtacagggacattgttggaagtgcttactatgttgctcctgaagtccttagacggagctatggaaaagagatagatgtttggagtgcgggtgttattttgtacattcttctcagtggcgtgcctccattttgggctgaaactgaaaaggggatatttgatgctattctgcatgaggagattgactttgaaagtcaaccttggccatcaatttctgagagtgctaaagacttggtgagaaagatgttgacacgagatccaaagaaaagactgacttcagcccaagttcttcaacatcagtggctcagagaaggtggggaggcatctgataagcctatcgacagtgctgttctttctagaatgaagcaattcagagcaatgaataagctgaaaaagatggccctaaaggttattgcttcaaaccttaacgaggaagagatcaaggggctaaagcaaatgttcatgaacatggacacagacaatagtggcacaatcacatacgaagaactcaaagcaggattagccaaacttggatcaaagctgtcagaagctgaagtaaagcagttgatggaggctgctgatgttgatgggaatggatctattgactatgtggagttcatcactgccacaatgcatagacacaagctcgaaagggacgagcatttgttcaaggcattccagtactttgacaaagataacagcggcttcatcacaagggatgaactggaatctgctttgattgagcatgagatgggcgacacgagtacaataaaggagatcatatcagaagttgacacagataatgatgggaggattaactatgaggagttttgtgcaatgatgagaggagggatgcagcagccaatgaggctcaagtagcctgttcccttaatagaaacggtgtaccactagttactgttcactttttttcttcatgtttggtacttggtagtcggataaagcttacaatgggtgttgcttttgtattgttgagagatgattgtctatacctttttttccctttttgctcgtgcttgttgcattgtagtatcttgaacgtcccttcctttttttaagtttgtttatgcaagtacatctaatacaaagtgcattttgtctttaaaaaaaaaaaaaaaaaagcggccaaaaaaaaaaactcg

SEQ ID NO: 5302 - DNA, 2994 bp, Zea mays
gggagttgagaacatggatggtttcgttgctcaatgggcaactttacatgagcgtggactttgaaaagtcacgtgaagcaagaactttccgtatcttggcccctaagcagggttctgctcctagctagctttaggattagttttctcaactactcatgtctcttgactcttgcatacatcctatttatttttccgagaaaaagaagtttcctcaaattttatttcttgtgttgatcgtttcgtagcagtaaaaccactcgcataaagtccttggaaaaatagtaaacgaaacagcgtagcgtggtggatggtaaaagaaaagtaaaactttgcgcccgcctatacaaaaccgggagcgacgggacgaccatgtcggtgagaagagaatattccacagccagtcggtccaagctggacagcaggaggacagacaggcagcccgcagccgccgccgccgcagcccgttccgttctcctcgctctcttttcacttgccaacgccaacgccaactgcttcttgtgcaattgggtgtgcttgctactgctcgctccccccgcggccgccctcgcttgctccgggcgccaccgtggggtcctccccccctgctctcccacacccaccctgtccttgtcgtccgctctgcgcaaccaaaccggagaaaccgcccccctttcactccccctcctcctccagatccatccgcctctcctcgaaaccgtctctctgtgcgtccggagtccggggagagggtggcggcggtggagatggagagcctggcgcagcgcgcggcgctgctgcgggagtcgctgcagaagagccagcaggtcaccgacgccgtcgtctccatactcggctccttcgacagccgcctcaccgcgctcgactccgccatgcgccccatccaggtgaggacgcacgccgttcggaccgcgcacgagaacatcgaccgcacgctgcgctccgcggatgtgatcctcacccagttcgacaggacccgagaggcagagcgtgaaatacagaaggggccgcatgagaaccttcaaggtttcctagatgcagttgatcgcttgagaagtattgagcgtttctttagttcaaatcggagttaccgtagtagcgatggggtgctcaaccacgtaaacgcgctcctttctaaggcccttgtcaggatggagggtgaattccagaatcaattatcccagcgcagcaaaccgatggagcctgatcgtctttttgattgtcttccaagtacacttcgaccatcgtctgaatctcagcccgaaggtgggaaaaacccatccgagaatcagcaaaacccagaggctgttgtatatagtcctcctgctcttattgagccaaagtttgttccactactctctaaattagcacaacagttggttcaagctggatgccaacagcaatgctcagaaatatatagtgaagctcgttcttcagctttagaatcaagtctgaagaacttgggcgttgaaaaacttagcaaagatgaagtgcagaaaatgccgtgggaaattttggagtctaaaatagggaattggattcatttcatgcgaattgctgttaaacttctttttgctggggagcgccaactttgcgaccaagtttttgagtgcagtcaatcgttgagggataagtgctttgctgcaataacaaagaacagtttggctacactactcagttttggagaggctattgctatgagtaaacgatcaccagagaaactctttgttctgttagacatgtacgagataatgtgcgagcttcaaacagagattgataccattttcgttggagaatcaggttcgcaaatgcgcgactctgcactgagtttaacaaaatgcttagcacaaacagcacaaaagactttcagtgattttgaagaagctgttgaaaaggatgcaacaaagaatattcatactgatggaacagttcatcctttaacaagctatgtgatcaactatgttaagtttttgtttgactaccagtcaactctaaagcagcttttccaggagttcaaggaagatgggacaggttctgagctggcagctgtaacaatgaaaatcatgcaagccttacaaaataatttagaagcaaaagcaaaacaatacaaggatcctgcattgatgcacatatttttgatgaacaacattcactatattgtcaaatctgtccgcagatcagaagccaaagatttgttgggtgatgactggattcaaaggcaccgaaggattgtacaacaaaatgccaatcagtatagaaggattgcttgggcgaaggtgttgcaatgcctctctggtcaaggtttgacttcatcaggtggtagtggtcatgtaggaagtgatggtggcaatagcagtggagcttcaagaacagctgtgaaggagagattcaggtctttcaatgtgttgttcgaagagatctaccacaagcaatgtggctggtccgttccagacactgagctgcgcgagtcactaagactcgcggtcgctgaaatcctgttgcctgcctaccgatcattcataaaacgttttgggcctctcattgagaatagcaaagcacctgggaaatacgtgaagcacactcccgagcaactcgagctgctgctaggcaatttattcgaggggaaacaagaacgtgcttgatagtttggtaccgcccgcagcaaggatgtgctgctcttcagcttctatgtaaaatacaaaataataaaaataaaaaagatctggaggccctgttagcgttagcattgcttgtgttctccccaatccttgtttagccgcattattatttgtacagaagaatatatgtgtcagctgtgccttgtgttgatctgatagcaggcgtgttcctggtttctctaaaaaaaaaaaaaaaacattcgttcgggtggagcactaagatggcgacccatctgtagtttttgagatagaaaaatacttccccctcgtcgttatttattttcggatggtgtacgcg

SEQ ID NO: 5303 - DNA, 2923 bp, Zea mays
ctatatatatatatatatatatatatatatatatatatatatatatatatatatatatatatatatgctaaaataatgtcattttaagttctcagacgatgttaaagctaaaaagtttcaatcaacctcaaatattgacatggactacagcaaagctctgttctcaaatatagcccataaaattatagctgaaagttgttaatttagacttgtttagagtccaaaatgtgttttacttttctaggttttgaaattttcaaagaacgtacattgaatgttcacatgatatggttaatataccgaagttgtggcgtggctaacctgatctacgagcatgttattcataagttcttgtgaagttgcttagagtctcaaatattagttttaaactcatatatgaggtctagctaattttttgtttttgttttttggaaaaaaacaaacattctctaatgggagataggtcctacaccaaaattgtatgataagatttagaactttatagttaaaacgtttttattatatgtatacagctgccatgcatgagcaacaatcagttatagcaattccaaaaagaatgtttattatatgcatgtgcagcgcgacgtctggggttcaagatgagtccacctgcttacctctcgttgacaccggtatcaaagtttgacctgttcacgtgccgaattggtgccaattacgcgtctggcggatctggcattctcaacaccacggtatatatggctccgacacgaagctgttctttttattcagcataattaagctgtcgtgcatacactacacatagttttgcttctcatgatgagtcgtacgtatacacaaatatatccccatcaccacaccaattactaataataattactggtaatttaattgtgtatgcagggaaacgggacactcacgctgcagaaacaaatcacgctgttctccaaaactcaagcaagaatgtcgtgggcccgctgcaagctcaggtctatggtatcgaggtccttgttccttgtcagcgccggcggcaatgacttctccgccttcagtgaaatgggcatgggcgaacaagacgccccagcctacatcagtagcatggtctcaacctatgtccagcatatcgacgtacgtgtgaggcgggaccatgcatcaaatctgtcattgcacattaattaaaggtctcgatgcaataattagtggacgacatcgatgcctgcaggcgttgtacaagttgggagcacggaaggttggggatcctagacgtgccagctatcggctgtaccccaggctccagagtccccatggccaacggcggatgcaacgtagcatggtctcaacctatgtccagcatatcgacgcgttgtacaagttgggagcacggaggttggggatcctagacgtgccagcgatcggctgtaccccaggctccagagtccccatggccaacggcggatgcaacgacgctgccaactctatggcgcagaacttcaacaaactcctaaggctcgaggtggcgaaagccgtcgcatcctccatgcccggcatgagatactccattgcaagcacctacaattttgtcaccgacttgatggacagccatctagtggctgggctccgggtggtcgacagggcatgctgcggatcgggaaaactgaacgccgcggtcatgtgcgcccagccaaacacgacttactgttcggatcgcgacgactacatgttctgggacatgctacatcctacgcaggcaacaaatgaacgtggggtggtcgccatcttctacggcccgcaggagtacgcggatcccatcaactttgcacagttggccgctgccacagcaaatgatgatgatgatataaatactgctatgaccgcaggcgtctatgccgccatatgataaacactatttatgtcgattggcatgcagctgcgacatgtcactacctgagtactatatacgtaattcagttggaataatgtacgttgtgtgcatcatcagtctctctctatatatgctggaaataaaatgaggacaagagaccacaagaaaatgttagaaaaagtgtcagttaatttccttaaatgccccctgcctcggacccgcggcaaagtctattttacactcggcaaaggctttgccgagtgtaacactcggcaaaaaacgctcggcgaactgtacgtcggcaacggtatctttgccgagtactttttgtcgggcactcgacaaagaatttgtcgagtgtcgtttgacactcggcaaagaaaagtcactgtcacggcgccaagtgccgtgacggtgacagatcctttgccgagtgtctttttggcactcggcaaagaggccaattttgccgagtgtctgctatcgtggccctcggcaaagacgggtccagtgggccccaccgccagtccctgtgccgagagctctcgtaggcactcggcaaaggaggactctttgccgagtgtctagtggaccggcactcggcaaagagtcctccagtgggtccctttgccagtccctttgccaagtgccttggcaacagcactcggcaaagatggctttgccggttcccaggtttccttctttgccgaatgccatggtcagcactcggcaaagatggctttaccggttcccaagtttccttctttgccgagtgccatggtcatagcactcggcaaagcgaccctttgccgagtgttacactcggcaaagtgaccaggatgtccctttttatttgtttttgctgtttcatccgaacaaacaaaagatatatatcattcacatcacattatatatcaatcgcatcacagaatgaacacatttatcatcaacaccatatatatcacaaagtctcactaatataagtctcacaaatataagtcaggatcatcacaaaacagatataagtctggatcatcaaag

SEQ ID NO: 5304 - DNA, 1595 bp, Zea mays
  misc_feature (1373)..(1373): n is a, c, g, or t
agatctggaattcgcggccgcgtcgaccgatgcgtgtcccgatccaacggtctccgtcgtcccgtccgcgtgataaagcgccggcgcctcttctcgcgtggcctcccgaaggttctaggctcgattgaacaaattggagcggcactacactcctccacgcctccacctccagcctcccactgatctggcctctctcgagttaatcctagatcaatatgagaaggggctacagttacagtccttcaccaccaaggggctacaggagaagggcgcgcagtccaagtcctcatgatcattatggtggtcgtggtagggatctcccaaccagtcttctggtcaggaatctccgtcgggactgcaggccagaagacctccgtcgcccatttggacagtttggtcgagttaaagatatatatcttccaagagattattacactggacgcaacacaagcctaaaagattattgttgaagagaaggaagaaatagagaaattcaattaagtgatctgcaacttaaaagagtactcagtactgttcaagagatgggaagaaatagagttacaagtttaagagatactcacatcatgaagagtttcaagtctgaatttaaactctcatgagtgcaagggatccccgagggtttgggtttgtccagtattatgatcctgctgatgctgctgatgcgaagtactatatggatgggcaggtagttcttggtaggcaaataacagttgtttttgcagaagagaacagaaagaagcctcaagagatgagagctagggacagagtcaggggtcattcttatgatgacaggaggtattctcgctctaggtcgcctcgttattataggggccgctctccttcacgcagccaaagctactcgaggtctccacctcagaatccaagacacagacttagagagaggtcctactccggctcacctgtggacagcagatcaagaagtgggagcccttatgaggatggatatcgcaaatcatcacggagagagaggtctctttctgtcagcggatgaagcagttttacggtctagagctattgctgtgaatctgcgcatggtggcctacttgctatgtctttatgaaccatatatgttctgtctagattatcattcccagtaccagagaagtatcgtgagactgtttgctgtactttctagtcttgaggatacagaagggggtcaccgattctctcagtagatggactattgaccactagctacgccagttccactgctttgtgtatttacaggcagctttgcggtttgaataaaattgtttgcatcggggaaagctaataaaaaaaaaaaaaaaaaaaaaaaaataaaaaaaaaaaaaaaatttttctatcccctncacccccgggggggggccccggaacccaaattccccccaaatagggagctataaaaaccgcccgttcccggggggccgctttttaaaaaacacgcggggggggagaaaaaacccccggtgggaccccccccaattaataccgcccgtggtagaaaaaaccccccccttttttttcggggggggtggagaaaaaaaaaaaaaaaacgcgcccccccccccccc

SEQ ID NO: 5305 - DNA, 2705 bp, Zea mays
  misc_feature (2672)..(2678): n is a, c, g, or t
  misc_feature (2686)..(2691): n is a, c, g, or t
gggtacctcgaggccggccgggacgaactggcgtgccagtgccagtgccgagcgcccgagcccttactcctcttcttccgaccccccgctggcttggaaaaaaggggaagaaaactcgcgcagtcggtcaccgaagggaggagcgcggtcgaggtgccgcccacacggagctgcgaggtgtttgtaggatctcctaggtgagcccctgctgcttggagacagccatggccaccggcgtggctccagctcctctcccacatgtcagagtgcatcatgggggcgtcgggttcaccaggagcgtcgattttgcgaaggtcttgtctgctcccggtgccggcacgatgagggcaagctcctctagaggcagggcgctcgtggcgaagagctctagtactggctcggagaccatggagctcgagccatcttcagaaggaagcccacttttagtacccaggcagaagtactgtgaatcaacacaccagacaaggaggaggaaaactcgaactgtgatggtggggaatgtgccacttggcagtgatcatcccataaggattcaaaccatgacgacttcagataccaaggatgttgcaaaaacagtagaggaggtgatgaggatagcagataaaggagctgatcttgttagaataacagtccagggtaggaaggaagctgatgcctgctttgagatcaagaacactctggttcagaagaattacaacattccactagtggccgatattcattttgctcctacggtagctctaagggtggcagaatgttttgacaaaattcgtgtgaacccaggaaattttgctgatcgtcgtgctcaatttgaaaagctggaatatactgacgacgactaccaaaaagagctagagcatattgagaaggtgttttctccattagttgagaaatgcaagcagtatggaagagcaatgcgaataggaacaaatcatggtagtctttctgaccgcataatgagctactatggtgattctccacggggaatggttgagtctgctttggaatttgctagaatatgtcggaagttggacttccacaactttgtattttcgatgaaagctagtaaccctgttatcatggtccaagcatatcgcctgcttgtggcagaaatgtataacctaggatgggattatcccttgcacttgggtgttacagaagctggagagggtgaagatggaaggatgaaatctgctattggcattgggacactgctaatggatggtttgggtgatacaatccgtgtctccctcacagaaccaccagaagaagagattgatccttgccaaaggttggcaaatcttgggacgcaggctgcaaaccttcaaattggggtggccccatttgaagaaaagcacaggcgttattttgatttccagcgtaggagtggtcaattgcctttgcagaaggagggtgaggaagttgactacagaaatgtcctgcatcgtgatggttctgtactgatgtcagtttccctggatcagttgaaggctcctgatctcctttataggtctcttgcagcaaagcttgtggttggcatgcctttcaaggatctggctactgtagattccattcttttgagggagctcccccctgtagaagatgctgaagctaggcttgcactcaaaagattagttgacatcagcatgggcgtactggcccccttatcggagcagttgacaaagccactcccacatgcaattgtacttgtcaacctcgacgaattgtcaagtggtgcacacaaacttttgccagaaggcactagactagctgtcactcttcgtggtgatgaatcatacgagcagctagatattcttaaggatgttgatgatataacaatgttgttacataatgttccatatggtgaggagaagacaggcagggtgcatgctgctaggaggttatttgagtacttacaggccaatggcttgaacttccctgtaattcatcacataaatttccctgaaaccattgacagagatggtcttgtcattggtgctggggccaacgttggtgctctcttagtcgatggtcttggtgatggtgtattccttgaagctgctgaccaggaatttgagtttctgagggacacatctttcaacttgctccaaggttgcaggatgcgcaacacaaaaactgaatatgtgtcttgtccttcctgcggccgaacactctttgaccttcaggaaatcagcgctgagattagagaaaagacctctcatctgccaggtgtctcgatcgctatcatgggctgtattgtcaatggaccaggagagatggctgatgccgattttgggtacgttggaggcgctcccggaaagatcgacctttacgtcggcaagaccgttgtgcagcgcgccatcgccatggaaggtgccactgacgccttgatccagctgatcaaggaccatggccgatgggtggatcctcctgccgaggagtagggctgtaggctgtagccaagtctgtagtttatatattctgtaaagcgaaacacgcaatgcagtaactgagcatacgatgtacatccctacacattttgtacatttattgagatctgagaaataaactagaaaccgtcggtgacggcatgtctgcagcaccccaaaaaaaaaaaaaaaaaaaaaaaaaaaaaaaaaaaaaaaaaaaannnnnnngggggggnnnnnngggggggggccccc

SEQ ID NO: 5306 - DNA, 1836 bp, Zea mays
gtatagaaaacggggctgccacgcgcgccggccgggacatccattttcatccctagctgtggtcccacaggtcgcaccattctcccctcttcttccgccgatacacacgccctgcacgggggctcgccgaggcttcagtttactactgaagcacgcaccgcagcgtctccaccttctgctcaacctccgcttccgtaggtgccggcgctaagcgaggatccctccgttcatcggtcccgacggcacctcgactcgtttcgtcggtcgctgtggcgacgggtgattgactgcgatatgaggcaatggttatgttgtaactgccactttgatgacgaggaagatggccatgacaaggaacaggccaaagctcagagcaataagatagaccccaagcagaagtcttcaaaacctcctgttagtcaacctgagccagagttctcccctccaacaattgatgttcctgaattgtcattggatgatttgaaacaaaagactgatgattttggatcaagtgctctgattggtgaaggttcttatggacgagtatatcatgccgctttagatgatgggaggcaagccgcagttaaaaaacttgatgcatctgaaaatgagcctaatgatgagttcctcaaacaggtctcactggcatcaaagctaaaacatgaaaatcttgttgagatgttgggttattgtgtggatgggaattatcgtatacttgcttatgaatttgcaaccatgggttcgcttcatgatgttttacatggaagaaaaggcgttcaaggcgcgcagcctggccctgtgcttgactggatgcagagggtcaaaattgttattgaggctgcaaaaggtatagaatatctgcatgaaaaggttcagccttcaatcatccatcgggacatcagatcaagcaatgtactgctgtttgaggatttcaaggcaaaaattgcagacttcaatcttttgaaccaagcaccagatatggcagctcgtctccattcaactcgtgtattgggaacttttggatatcatgcacctgagtatgctatgactggccagctgacacaaaaaagcgatgtctacagctttggcgtggtccttttggaacttttgactggaaggaaaccagtagatcacacaatgcctcgaggacaacaaagtttagtcacatgggctactccaaggttgagtgaagacaaggtgaagcaatgtgtagatcccaggttgaagggagaatatcctccaaagggagtcgctaagcttgctgcagtggcagcactgtgtgtgcaatacgaagcagagttcaggcccaacatgagcattgttgtgaaggcgctttcgcctctccttcaacaaagacctgcaccaggcaccgcagagccagccccgcaacctgtgagctgaatccagtcacgtgtgatgggacctcgcagcatcaggcatctccgcgatcattcaatcagcaagtcattgagagtattttgaatatttgttctgtagcattctgttcctggcttgatgttggcgctgcacaatgacaatggtatatgcagtaggtttgatttttctttttcttttaccttctctataccagtaccaagttaccaactgttcgtagattttcagaattcgctgcttgaagaatagatgcaggatgatctggattttttttttggtctggcgtggcgttgctgccttctcttccatggttaccaaataccatgattgaaatcaagtcacttctactttgtttgaagtcaaaattcttatactttgaaaaagttcgtagaaaaaaccccaaaaaaaaaaaaagaagggcggccgccaacaagtgagctc

SEQ ID NO: 5307 - DNA, 1287 bp, Zea mays
gtaaaatatggatatggggagggtgtcaatgggtaatacccattacacccatacccactctaaacatgagagatggtgatggtgaaggagatatgcgggttcagtgaggcggagacggcaaggagaaaaggatggtgcagacaattgctgagtaggcatcagctagtcagccgaggccgggtgatgcacatcggcggcacggaagaatgccagcatcactgcccagcagttccctggcaacaacttatatctcagttctctgtgtgctctccatattgatcttttgttcaattgaatatcttctgttgatgtcaaatgcagcaccttgatcaggaaggtattgggttccgcgggcccgccccgtatgatgataatgctattacaaatgcggttgagatatttaatacctctagtggcgccgttcacttcatggcatcaaataacgactctggtgtgagatactatgacatggagagattccagctattcaagcattttcagtttgaatggccagtgaatcatgcttcgttgagtcctgacagaaaggtggttgttattgtgggtgatgatcctgatggtctacttattgatgcaaactctggaaagacagttcattccataaaaggacatcgggactactcatttgcatcggcttggagccctgatgggcgaacatttgctaccggcaaccaagacaagacatgccgaatctgggacgtgaggaacctttcaaaatccgtccatgtgttgaggggtaaccttggagccatccggtccatccgcttcacctcggatggccagttcatgtccatggctgaacctgctgactttgtgcacatctacgacgtgaagagtgactacaacaaaaggcaggagctggacttctttggcgagatatccggcacatcgttcagcccagacactgacacgcttttcgttggtgtgtgggataggatgtatggcagcctgctacaatttggccgcctgtacaactactcgtatcttgactccctgttttgatgtggatccaaacgggtgttgaactgttgggttttggtgtacctcagtgccctgaatgttgtcagcataaattaggtggttatccctaatcaggatattaagttgcaaagataattgaattaataaatgttgtaccgtgcccgatgtgtatatgtaaaaagaaatgtatacatgtgcctattgagagaccgagttgagatgtgacttaggggttgtttgtttgggattataatctattcagattatataatctaatttatttgtttt

SEQ ID NO: 5308 - DNA, 2557 bp, Zea mays
ttttttttttttttttaccatatcatccagactattaaataaatccaaatgaatctccgtcgaaacctttcacagactataccaggacgcaagatccaacggactgaaataaattaataactaatcagaagctcaggctacactagatgcagacacaagctgagttgattatagaaacgaaacccgacatgaataaatgtttccagcaaatttaactggaaacacacctatacaaaggctgcttctgtatgtacaaatcatctaaaaaaacgttaggctacataaagtagctcaacggtgtcttgtgcctcgacccgccttctccgtagaggtcgttccattgaacgagctcattcatattttttgaatccgatgatatactcgcacaaacctgctcatgtgcgtgcttgaaatcactaaactttagggagcgaacgtcgccgctacagcactgaggtggggctggcctattttctgcttcagctaaggttctctccttcttctctctttcaagaatttcccttatgggacgatgtgctgcagttatacacaggttcttcagatcactgcctgaatacccatctgtcaggtttgctagcgcctccagatctacatcatctgccaaatcttcttttgctagtatcacgctaagaatcttctttctgttgggtgcatctggcaagttaaccatcaacctcctggggagcctcctgacaacagcctcgtcaagatcaaatggcctattagtggcagcaagtaccagaacacgttctttgtcttttgtcctaagaccatcccagttcaccataaactcatttttcatcttgcgcatggcctcatgttcccctggattctcacgtctacccagcatgccatcaacctcatccacgaaaataacactaggagaaattttgcttgcaagtgaaaaaacagctttcacatatttttctccctctccaaaccactttgaagcaatgcttgacattgatatgttgataaaattagcaccagcctctgttgcaacagctttggcaagcatggtcttaccggtgccaggtggaccaaaaagcaatatccctttacatggcttcataagttgtcctttggagaacaactcaggcctttgcaaaggaagcataactaactcctgcaaagtttccttgacattttctaatgctccaatatcctcaaaggtaacaccaatctcatctggagggatgacatctggaagaagacgtttttcaaattcattctctgtgacaacatccttgagtgacttctttgtgctcttcttcttagggccactttggatactttccaacaaatcaattccatacttaaggcttacaccggaaaggacaactctcgcatcctttccaggagtttgaatagggtgatccttgagttgataactcaaagcataaccaactattttatcgacacattcgcttgtcagattacgatctttgacacaaaccactgattctaaatcagtacattccataccatggcgggttagaaaagattgtattttcaaaaaattagcctttgccttaagaatttcaatgtcacgacccaatagctgtttccactgggagagttccgtttcatcctcaggtgattcaattgtcactttatttgggaaaagtttagttatatgctttgacatcttgagtgcttctttatttttttcacccacccgaccaaagctatcctgaaatgcaaggtcaagtattgctgcttggctgtatgagaacttgagccaaggagacccattgtttgacttatctttccgagcatctgtctgaatctgggacccaacaataaaaactccagctgggaaactttcaagcttattctttagaccatggtaggtgtaattatttccacatattttctcaacatccttcagaaataggattacaggcacctgttgactttcttcagaggcaaactcaaacacaacatcaaatgaatgtttggctctatcttcccatcctggaccatcgaggcatagagaatcaactgaacagaataggccatgatcaagctcacaactgcctccaagatcaatgcccccggggatctgtttatcaaatctgactccaacttttgaggatccattttccgcaaaagtaagcctcacttcaccctgtgaaccataatcaggagctctctgtccctcaaacataaaccctgatgattgaataggaccaatgtacctcaccctatcaccttttttgtatggttttgattcctttgactttgaaggctgcccaccagacagcagtgaataatctatgacaagcagcttagcaccaaaggatttggtaagtgccttaaccagtaattcttggtagatctcggaccctggtgggccagataatagtacccttttacaaagagaagatatatcctttgtccacttagtggattccttgcagcatagatttacatacgatgatgacaaaagaacatttttggtattttcactaagataatatggaaaattatcaaatgattctgatatatcacttgcacttatagctgctttctt

SEQ ID NO: 5309 - DNA, 2262 bp, Zea mays
aattcggcacgagggctgtatccagagatggtgtgaagcacacacaattctactctgcgcagggtctgtttcacttgccattttggataggatcgctcgttttggaattaactttatgctaacagaatctaggtgtcattaagctagattaagcttgctgcttgacttagtagtgtaaatctgtaaagaaaattacctggtttgggtttagtctctataaaagaaatggaacagaggaatgttctggcattgggtgaacatgttctaaaagctactgtttggaagcggaagcataagactgctatggagcaccctgaaggcaatgatgtgatggtgttctctcagcatgatcaaagaaagcaccctgtgatatttgacgacagagctaaatgtaagaagtctaaattaatttcctgtgggagtggagttatattggagtcatattggaactttaagacaagtgggctgcctgtgcgcgtgcttttctaccaacatggtgactggagtgattttccagaggatgttgtaaatctagcacaacaggacttccagttgaagaagccaattacaactgctgtgttccagaacaagcacatcctgttggacttcattcacatgatttgcatagattatgagatgaccatagacaaaccactagcatgggttgatgataatggcaaacgcttctttccagatttatctgctgggctctacacatctaaaccatctcagcatgagaatggtgaagctgatgagtgtgatggaacgcctacaagtgtagctgaaagttctagttcggtatctgttggtgaagtagtttctcatggtaagaggatcaatgatattgcagaggacaacatgagagcacataacatattgtatgaagctgttggtgaaaatatttcaggtccttcattccatttgaatgaatattctagtggaaccatacaagctactggcaagccaaacgattgtcgacgtattgattcagctgtgcggaatttgttgctcaaaggattaggtcagccgtttagtgaggaagatattattggtatctatagaacaccactgctagatcagcgagggcaagttcgttgtggtctcttccagaaggagatcgaagagaccaggagtcgtcgggggaatgcaaatgtacgttatgcttggcttccttgctcaagatataccatggagcagatggcaatgcggggtgctctggaaatcgcgaagcctcataaggggtccatttgtggtgttgggacttgtcttgctcctgcaaactgtacaaattcatgtgccagatattctgattttcatgaagatggcatcatcagaatgatgttgtgccgtgtaataatgggtaatgttgaggttgttttgcctggatcaaagcaatttcagccatccaatggaagttttgataatggtgtggatgatcttcaaaatccacagaattacatcgtatgggatgctaatgtgcataaacacatatatgctgaatatgctgttattgtccaagcacctctcgtgaccaatgaatgttcgggcttgaaggatagcgtgcccaacatatctgagatcataagttctggttctcgagacaatctaaccaaggaggataggttcgcgccttgtggtgtcgaacaagaagcacctaggctggggcgtgctccaagggccccctcctcaccatggatgcccttttcgatgctttttgctgctatttccacgaaagtgcctcgttcggacatggagttggtcatcagatactatgaagaattcaagaggaagaggatgagccggagcgacctggtggtacggatgaggcaaatagtcggtgataagatattggtttctacaataatgaggcttcaccaccagaagaagcccccatcgatggcagcagcagcagctgggctagcaagagcactcgcaaggggggaagagggagggggagtagccgagtaagattagtttaagccgccttgtcttttgagaaatttatggagcacatatgctttgtcgacatggccagacccaaggtgtcaaaagggagggagatgagctgagcaactgttgtagtgtagtctcaaactcaaagcgtttaggtcttgacatttgacaaactaaaactcagaaacattatcatgagtagtgttttttttttcgtttctctttcctggatttaactattgttattgctatttcgtggatatctgggcactgaaggccgtgctattgttggtttatgatggtatgatt

SEQ ID NO: 5310 - DNA, 2483 bp, Zea mays
cattgggtacctcgaggtcggccgggaaagcagatcgccacgccaccaccaccccagctcactcgtgccgtgcactcgacccgtcccccctccctccactcgatccacccgccaagacctcccattgccgccgccgagccagccagggggggagaagagaggccagccgcgtcgcggcgggcggaggaggaggacgagcgggagagccgagccgagccggccgggcaggatgttcgggcgggacccctggggcgggccgctggagatctccaacgccgactcggcgacggacgacgaccgcagccgcgacctggaccgggcggcgctgatgcggcagctggacgagacgcagcagagctggctcctggccgggcccggcgaccaggccggcaagaagaagaagcggtacgtcgacctcggctgcctcgtcgtcgaccgcaaggtcttcatgtggaccgtcggcaccgtcctcggcctcggcgtcttcatcggcttcgtcatcatgatcgtcaagctcgtcccgcacaagcgccccccgccgccgccgcccgaccagtacacgcaggcgctgcacaaggcgctcatgttcttcaacgcgcagcgatccggcccgctgccgaagcacaatggcgtgagctggaggggcaactcctgcatgaaggacggcctctccgacagcaccgtccgccggagcctggtcggaggcttctacgacgcgggggacgccatcaagttcaactaccccatggcatggtccatgaccatgctcagctggagcgtgatcgagtacagggccaagtacgaggccatcggcgagctcgaccatatcagggagctcatcaagtggggaacggactacatcctcaagaccttcaattcgtctgccgacacgatagacaggatcgtcgctcaggtgggtgtaggtgacacctctaaaggcagcagtcagcctaacgaccattactgctggatgaggccagaggacatcgactacaagaggccggtcaccgagtgccactcctgctcagatctagcgtcggaaatggctgccgccctggccgcagcttccatagtgttcaaggacagcaagacctactccgacaagctcgtcaagggcgccaaggccctgtacaagttcggcaggctgcagcgtgggcgatacagccccaacggatctgaccaggccatcttctacaactccaccagctactgggacgagttcgtgtggggcggtgcgtggatgtacttcgccacggggaacaactcgtacctcaccgtcgccacagccccgggaatggcgaagcacgctggagcatactggtttggaagtccaaactacggagtgtttacctgggatgacaaacttccaggagctcaggttcttctcagcaggctgcgactcttcctaagtccagggtacccttacgaagaaatactgaggacattccacaaccaaaccgacaacgtcatgtgctcgtatttacctgtattcaattcattcaacttcaccaaaggaggattaatacagctcaaccatggaaggcctcaaccgcttcagtacgctgtcaacgcagctttccttgcttctttatacagcgactatcttgaagcggctgacacgcctgggtggtactgtggaccgaacttctacaccatagaagtcctccgcaagtttgccaggtcacagcttgactacatccttggaaagaacccattgaagatgagctacgttgtgggtttcggaaacaagtacccgaagcgccctcaccacagaggtgcgtcgatacctcataacggcgtcaagtatggatgcaaaggaggttacaaatggagggacacgaagaaggcaaaccctaacatccttgttggagcaatggtggctggccctgacaggcgtgacggctacaaagatgtccgcacgaactacaactacacagagcctacccttgcggcaaacgctggcctggttgcagcactgatttctatatctgatatcaaaaccggacggttcggcatcgacaagaacaccatcttctctgcgatccctccgatgtttccgacaccaccgccgccaccatcagcatggaaaccatagagagacagacctctgaatattccccccccccccccccccccaaaaaaaaagcatcaacacagggaagtggagcaaacatatgatcagttggtacagcaaaggccaggaacaggaaagcggacagcataagcttatagagcttctatttctgtaccagtgtgacagatcagtataaaatcctctgtcatacatagaccagaagttgtgtgcatcgcgtgaaagctaatttttggggtcttgttgctgtgggcattcctgctcatgtgtgaagttattttttgtagaaattgtacctttacaaattgttataggagtgacttttcatagtagtaaagcatttgtgtgacctgtaacaaaaaaaaaaaaagagatggtacagaaaaaaaaa

SEQ ID NO: 5311 - DNA, 1983 bp, Zea mays
aaatgtatgctgtgcgcgcacagccttttcttaaaaaaaggaaaaaagaggcacaataaatggcgtcaaagccacgggccttcgcgaaggtcttcctccccgcgctcccgccgccgcccctcctcactgcccccgtcttctcgcggtagccggccgacgaatcggggtgccggcgcggcggcgatgtcggctgcggcggctgcgccagcgcaggctccaaggaagtgggagggactagtggacgaggtgctcgagagggaggtgctggcagcgtgcctggaccaggcccccgagcgccgccgcatccgcgaggctttcaaggacgttcagctcagcatcgaccattgcctcttcaagggacaatatagtggcatcagaacaaaggagtcatgtgagcataactctaggggtgtggagattttctcaaaatgctggtttccggagaatcgtcgaatgagagcaattgtttgtctttgccatggttatggagacacatgtaccttttttcttgatggagttgcgaggaagattgcttcagctggatatggagtatttgcactggactaccctggctttggtctttcagaaggacttcatggatatattccaagttttgatacacttgttgatgatgtagctgaacacttctctaaggtcaaaggaaatcctgaatatagaggcctaccgagctttctgtttggccaatctatgggtggagcagttgcattgaaggttcacttcaagcaaccaaatgaatggaatggtgcaatactggtggcaccgatgtgcaagatagcagacgatgtggttccaccttggcccattcagcaagttctaatttttatggccaaacttctgccaaaagaaaagcttgttcctcaaaaggatttagctgagttggcattcaaagagaagaagaaacaagagcagtgttctttcaatgtgattgcctacaaggataaaccacgtttgcgaacagctctggagatgctgagaacgacacaagagatagaaaggcgtctagaagaggtttctttgcccttgatcattttgcacggtgaggctgatatggttactgacccggcggttagtaaggctctgtatgagaaagccaagagccaagacaagaagctgtgcctctacaaaggtgcgtatcacgctatcttggaaggtgaaccggaccagacaatattccaagttctcgatgatatcatatcctggctcgatcagcattccacaaaagaaggtatatcgttgtgaatcaggcagcgctgttcgccaggattgggtgaattcctttggcaatgctgtatcgcttccggttggggatcccagattcaacggtggggattccatttttgatatgaccctgtaaaattcttagttcagattattgatgtctccgtcatgtacctgaacgatgtagacgtacatatatgtaactgattaatgtgtatcaattgaccacgaattatttgggaaaacctcagttgcaaaacgccttttatttaatcacaatttctatccttgtgcggcctctgaaagtgagatgaactagcaataaaggaggtgttctgatgaactagcgataatggagaaggtgttgggtattttttttattaaaacctgaccccctttgcagctctcccggcgtttcacgccttcggcgccgatcactggctcgcacatgtctctcctcacgaagccatcgttgggaaccctgctttgggaatcttctatgttaaaactagtgcacgcgttcacttgaggcttggctcacggacgcgaacttttccacacggacacgacctttccagccttgccctcgacggccacacgacgcccacttcgatctcttcactgtcaccgtcccctccactcgtcttgccatcgactgcgtcctgtctgtgccgcagcgcaaggaaagtcagctcctgctacgacgcctcgaccccgcgcctctccacctcctccatgctcctc

SEQ ID NO: 5312 - DNA, 1501 bp, Zea mays
gtcgacccacgcgtccggcgagcgccacccagttgctcaagtgattccaggcccacgccacgccaaccccgggctcaactcgagtccacacgccccagcaccacccctgcctctcagtccagtcccccacccaccaccaccactcctcccctcgccgccgcccgttcccgaccgatccggccggatcgccccgccatggaccagtacgagaaggtggagaagatcggggagggcacgtacggggtggtgtacaagggcaaggaccgccacaccaacgagacgatcgcgctcaagaagatccgcctcgagcaggaggacgagggcgtcccctccaccgccatccgcgagatctccctcctcaaggagatgcagcaccgcaacatcgtcaggctgcaggacgtcgtgcacaacgacaagtgcatctacctcgtcttcgagtacctcgacctcgacctcaagaagcacatggactcctccacggacttcaagaaccaccgcatagtcaaatccttcctctaccagattctgcggggcatcgcctactgccactcgcaccgcgtgctccaccgcgacctgaagccgcagaacctgctgattgaccgccgcaacaacctcttgaagctcgcggactttggactggcgagggcgttcggcatccctgtccggacgttcactcatgaggtggtgacgctttggtatagagcgcctgaaatccttctcggtgcaaggcattattccacccctgttgatgtgtggtcagttggttgcattttcgctgaaatggtgaaccagaaggcgctttttcctggcgactctgagatcgatgagctgtttaagattttcagaattttgggcactccaactaaagaaacatggccaggcgttgcttcgttgccagattacaagtcaactttcccaaagtggccacctgtggatcttgcaacggtggtcccgacactcgaaccgtcgggaatcgatctcctatctaagatgctgcgtctagatcccagcaagaggatcaccgcccgcgccgccctcgagcacgactacttcagggacctcgagcacgcctagcaggatatggatggatggatgaaccatttcccctcccctgctccctctgtaaattacggtagcagccgcgatgcttggggccggcgagtacccccgtctgggcggccgttgagttatgtgtgttactctatagtatgactaagctggagtgcctcatgtccaccatgcagtgcagcttttttctccgacttttttttgctgcgtagagaaatgagatgagaaatgtgatccagagatccttgtgccatgggagccctagtagtagccttgtagctgtcggaggtgtcggcactggcctctcttgaacctgtatgatggctggagagagaggagagacggcggcttctctggttaaaaaaaaaaaaaaaaaaaaaaaaaaaaaaaaaaaaaaaaaaaaaaaaaaaaaaaaaaaaaaaaaaaaaaaaaa

SEQ ID NO: 5313 - DNA, 1902 bp, Zea mays
tgcatgcatgctctactgttcatggctacgagcagttattgcgctggcaacttggcactgcccccgatctccctcaccgtcaccggcccatcacctaccagctgctgcttgccattaacattaacccctccgcacgagaccattacctagaacatcctaatcgaaaaatcgaccatcgagctagatcatatcgatcgccatatatatagtagggagcggctcgcagggcaagaacgaagcagatggcggtgatgagccgccgccgcgtcatccagctcgtcctcgttggcgtcgtcgtcttcctggtggccccgcggctgtcgtggaaccttccgggcggcctcgagaagctggggctgcagcagagcccggcggcggtggcggtggcctgctgggcggctgcggtggcggcgtgggcgtacgcggtgtcccggccccggcccgtgtacctggtggacctgtccgggtacgtggcgggcgcgtcgcacgaggcgtcccgcgccaagacgatcgcccacttcgggcggtgcgggcggttcagcgacgagagcatggcgttccagaagcggatgctggagcggtcggggctcggggagcagacccacttcccggcgtcgctcatcagcgtgcccgtggacatgtgcctccgcacggcgcgggaggagtcccacgccgtcatcttcggcgtcgtggacgacctcctccgcagggcgcgcgtggcgggcggcgacgtcggcgtgctcatcttcaactccagcctgctcagccccacgccgtccttcacgtcgctcatcgccaaccgctacgggatgcggcgcgacgtcgtcagccacaacctcagcggaatgggatgcagcgccggcatcatcgccatcgacctcgccaagcgcctgctccaggtgcactcggacacgtacgcgctggtggtgagcacggagaacatcactctcaacgcctacatgggcaacaaccgccccatgctggtcaccaacacgctcttccgcgtcggcggcgcggccatcctgctgtccaaccgccgcgccgaccgccgccgcgccaagtaccagctcatccacacggtgcgcacgcaccgcggcgcgcacgaccagagcttcggctgcgtcacgcaggaggaggacgacgcggggtgcgtcggcgtctccctggccaaggagctcatggtggtcgccggcgaggccctgcgcaccaacatcaccacgctgggcccgctcgtcctgcccatgtccgagcagctccgcttcctggccaccgtcgtcctcaaccgcgtcttccgcgccagagtgcgcgcctacctgccggacttcaagctcgccttcgaccacttctgcatccacgccggcggccgcggcgtgctggacgagctggagcgcagcctcaacctcagcgcctggcacatggagccctccaggatgacgctctgccgcttcggcaacacctccagcagctcgctctggtacgagctcgcctactgcgaggccaagggacggatccgcaagggggaccgggtatggcagatcgctttcggctccggcttcaagtgcaacagcgccgtctggaaggcgctccgcacggtggacggcggcgaggagggaaacccgtggacgccggagatagacgtgctccccatccacgtgcccaaggtttcgcccatcgatgagaccacctacaagttcgctgacggcgccacgtacaagatctctcttggttaaaatatattactactattgttattattattattattattacatgattgatttctcatcatcagcatgtaacctaatcaagataatttaagaagcagcagcgcgccgttattaaaaaaaaaaaaaaaaaaaaaagaaaaaaaaaaaaaaaaaaaaattaaaaaaaaaaaaaaaa

SEQ ID NO: 5314 - DNA, 2012 bp, Zea mays
cggccgcccttttttttttttttttttttttttttttttgtttggacatcggaaggcccccacatccacagcaacaaaatcatgaaaagtaacttcagtctcggtcgtcaactttttagcagtgcaagtagcaatacgattgcagatggcagcaacaaattgaacagtatggtaccttttcatgcacaagtaaaatagtacattgttaacttcacgtaattgattatgaaacgaagaaagtgaatatttggaaacctgcagaagcatagcaccagataatcagttctctacaatgggaaaggctgatccaattttgttgttccccaatcggtagcacttgacgttcacactatacgggccaatatcgacgcggttgtcttcccctccaacaaaaaagcacaacgtgtagagtgcaacctcaaactcaggactgacgccaatcaacgtgctggataccgatttcagcacgccatgccactcaaactgaacagtcagcagctgtatctctgaatcaggcgattcaccacggcgccttggaaatatataaccttggtaatccacatttcccttggcttcttccaggtaaaactgaatccagttatggaagcctgatacctcactctccccttgtccccgtcctttgatctcaccaacaaacacatgctcaaaggcagaagagcagctagagttgccacctcttccatacaaatcaaaccatagggatgtcagcattctcttgaagtcctcgtagtcctgaggcacagcccccttctgcactaagtaccggtgcaagtacttaattggcgctgttctagcgatctcttcaacgaaagctatttcttcgtgcttatcctgctgggtaacaacttctttgtacccctggtgggggttgtagttatccagaagtgcgcagaaacgtgagtaggtgggttttcttagcacatcgtcgcctagccagctgaacaagctttcagatgccatatcacccttctgataaactttcttccccttgccacagtcgattatgtagtccttaccaggaacaatacggttcatatcgagctcccaaagtcggctacacgctttcgataagctattcagctcctccctggtgggctcgaaattgagtccttggtggatatgaccgacatcctcagagtacttttgttctgatggtggctttctgtatccattccatgcttcagactgctgtggtcttccatggcgctttttctcaccgacggtctgccagcctccatcgtttatcctttcttcttcctgatgctgattcccgtatccttgtgcctgctgctgttgctgacgccgccggctgccactgccatcccacctttcctccccctcgcactggttctgccggcctgcgtggtgctgctgctggttccgaccatcggcccttttccaaccctcgtcatccctcctctcatggcgattgtcccgccccgagcttcgatggtcccggcgctcgtccggatcgctgcccttctgctcggagacgacctcggcccacgtcgaccgcgatcgttcgtcgcgttcctcctccccgtcgtcatctggatcggagctttgggccgccctcctcctcggcacctcgtcgtcgtcggcgcggccgtggtccctctccctcacggcgtcctccacggcgtcgatggccacgtggaccaaccccttgatgagaccctccatcgcgcgccgacgagagcgaacggggaaggcgggtgacgggctgggtactggagatggatcggactgaccggctgccgcgggatgggatctgggacggggagggacgcgtgcttggttggtggactccactaatcgagtggctggcgctgcgacgcgcaggagatcatcggggatttccttacttggatttatcgtccgtgcgtgattactgattaagaacctgaagaagaaacttttgcagcggtcgtggacattcgcggtatgggccgggtggctggatgcgatcgcgggaggaccccccctcgagc

SEQ ID NO: 5315 - DNA, 1506 bp, Zea mays
gggtacctcgaccgggactcattcggtgccgcgcgtctactgctgatggaggctatggatttcaccgtcgccagcgccgacacggggtgccaggaacctccgaatacgctggtggactgggcgctggagatcctctccacagccgatccggacgagaaggcccgcctcggggacctcgccgcgtcgcggtggctgcgcggcgacatcccgcttccctacgacccgtcccgccccgcgcgcccgccgcccgaccgccccgcccggagcgccgaggtgcggctgctcccgccgtcgcggatgccgaagctgggcaagggcggcagcgcgcagagccgtttggccatgctccactcgctggcgcacaccgagagctgggctgtcgacctttcctgggacatcgtcgcccggttcggcgcggccatgcggatgccccgcgacttcttcgacgacttcgcgcgcgtcgcgcaagacgaggggaggcactacacggtgctctcagcgcggctgagggagctcgggtcgcattacggcgccctcccggcgcacgacgggctatgggactcggcgatgcgcacctcgcatagccttctcgcgcgcctcgccgtcgagcactgtgtccacgaggctaggggattagatgtccttccaacaaccatatcaagattccgagcaggtggggatgagcaaacagcaagactactagaagatattatttatcctgaagaggtgacacattgctcagctggtgttagatggttcagatacctgtgccttaggtcccacggtaatcacccaacctcatgttcagttcctggactggaaccccgttcctctgggctgccgggggatggcactgctgatggtaagacagctagggaggctgaaggtgaacctacacccaaactggcgaaagacgtcaggggtgacgacaaaatggtccagcaggtggaagatgaactgccatccaggattgcacaggatgctaatggtcgatctaaggtgaccgaacacgtcgaggacggattagcaaagtgcaaacttgatgacagtattgagaaatacgaagagttggtcattaggactttccacagggtggtaagagagtattttcggggacccctgaagccgcccttcaacacggaggcgaggaaagctgccggctttgagcctgcctggtatgaacccctggcagtgaaggaggcatgcatagagggggagacaattgagtgatgaatttgcactgttgttgtagtgtctgtgctatgtagcaggctagaaggcatatttgaaaatttgctgcgactagcgttccagtaccattatttgtttagcagatggtgcggcgctgagccttttttctaatcatgtttgtttgcttgccatggagacgcatgaacctatctgtgtgaaagcctttgttcagcttgacgtgggcttggagtgtgaaaaaaaaaaaaaaaacctcaaaggacgatgccaattgaggctggatttcaattaaaaaaa

SEQ ID NO: 5316 - DNA, 1687 bp, Zea mays
agaagtcggaggaaaaaggagtccctcccaacctcgcatcgctgttcccccaaacccaaatccaaagcaagcacttcgtcggcgggcggcggccgagggcgaccatggggcagggcactccgggagggatgggcaagcagggcggcgctggcgaccgcaagcccggggacggcggcgacaagaaggacaagaagtttgagccgccggccgcgccctcccgcgtcggccgcaagcagcgcaagcagaagggcgccgaggcggccgcgcgcctccccaacgtcgcgccgctctccaagtgccgactccgcctcctcaagctcgagcgggtcaaggactacctcctcatggaggaggagttcgtcgccgcgcaggaacgcctccgtccccaggaagacaaggccgaggaggaccgatccaaggtcgacgacctccgcggcacccccatgagcgtcggatccctcgaggagattatcgacgagagccacgccatcgtctcctcctctgtcggacccgagtactatgtcagcatcctctcctttgtcgacaaggaccagctcgagccgggatgctccatcctcatgcacaataaggttctttctgtagttggtatattgcaagatgaagttgatcctatggtatctgtgatgaaagttgagaaagcacctttggaatcttatgctgacattggtggactagattcccagattcaagaaattaaagaggctgttgagcttcccttgactcatcctgagttgtatgaagacattgggatcaggccacccaagggagtcatattatatggcgaacctggaactggaaaaactctactcgccaaggctgttgccaattcaacatctgcgactttcttgcgtgttgtcggtagtgaacttattcaaaagtaccttggggatggtcccaagctagtcagagaattgtttagggtggctgatgaactttctccctcaatagtcttcattgatgagattgacgcagttggaacgaagaggtatgatgctcattcaggaggggagcgtgagattcaaagaactatgttggagctgctgaatcagctagatggttttgactcacgtggagatgttaaagtcattctagcaacaaaccgcattgaaagtcttgatccagccttgcttcggccaggccgtatagaccggaagattgaatttcctctaccagatattaaaactagacgacgcatcttccagatacacacatcgaaaatgacattagctgatgatgtgaacttggaagagtttgttatgaccaaagacgagttttcgggtgctgatattaaggcaatctgcacagaggctggattgcttgccttaagagaacgcagaatgaaggtgacccatgcagatttcaagaaggcaaaggagaaggtgatgtacaagaagaaggaaggtgttccggatggtctctacatgtagccaatctattcatcatgccgaacaagttacccgattgtgtgtgtactagcacatctcttcatcatgggagatatgttaccacaatacttgttgcatactgtgctaagtggtcaggagaaccttgtattaattaattatcctttcattgtctcaaagtaaaaatttcccttgcgctaaaaatatgcatccgttcagcatcaaaaaaaaaaaaaaaaaaaaaaaaactcgagacctcgtgc

SEQ ID NO: 5317 - DNA, 1143 bp, Zea mays
  misc_feature (1141)..(1141): n is a, c, g, or t
cattgggtacctcgaggccggccgggagtcgtcggaaccccaaccgagttccccagtactccgcagtccgcacggccgcatccgtcaagatccgcgaagagcaacgaggcgaggcgaggggagggaaaacaagtgagtgagagagagagagagaggagggaaaatgctgcgccacgccgcccgccgcctcgtttcccgcgccgtcgctccgcccaccgcgcgccgggcgctcgccacggcggaggtgcccgcggaggccgtcgaggactccacgttcgtcgaggcctggaaaaaggtcgcccccaacatcgagcccccagcgacgcccctctccctcatgcagccgcgcccgcccacgccagctaccatccctaccaagctcaccgtcaacttcgtcctcccctacaagtccgagatcgccaacaaggaggttgacatggtaattgtaccagctacaactggtcagatgggtgttttgccaggccatgttgccacaattgcagagctcaagcctggtgttctctcagtacatgaaggaaacgatgtgagcaagtactttgtgagcagtgggtttgctttcgtccatgcaaactccattgctgatattgtggctgttgaggctatccctgtggatcagatcgacccagcattggttcagaagggtctcgctgaattcactgccaagcttggttcggcctctactgacctggagaaggctgaggcccagatcggagtcgatgttcacagtgccctcaatgctgcattgaccggttaattggtggcattttaaattgtcttgtctttttcatctacagttttagagtgagtttaagtttgcaaactcatgggcatgggatggagggaatgatcctaaataaattatactccatctaaaacatggacatatgtttcttgtttcctgaatcctgcatggatttctttttgtactggtgaacattttaactctgagctcaagacctggagctgctttctgcccccgttgagtttgggccatggatcagatgaaattgatgttcgtccgtaggttatgttaattgttaaatgttattatgtctatttttaagagaaatataaagtactgctcgggttactgcatcgtactttgggttgttaccactgntt

SEQ ID NO: 5318 - DNA, 942 bp, Zea mays
  misc_feature (930)..(936): n is a, c, g, or t
cggtccctgactgcgagcacatggaagaccgcctcgacctcccatggccgctgggcacccccgggccggccgggcttcccctccctgcctcctcgtctcctcggtctcccctccctgtcttccagagacacagagcagggcgctcttcggtcggaggagaagcgcgaccacgaccatgggctttatctcgttcgtcggccgggttctcttcgcctccctcttcctcctctcggcctaccaagagttcattgaatttggaaatgacggtggacctgcagcgaagaccttgaagccaaagttcaatttgttcgtcaagctagtgtccaagaatactggactggggctgccgcatatggatataaaaactgtcattgcagctaccatgtttcttaaaggctttggtggtcttctgttcatagtcagcagctcatttggagcattcctcctgctcatttacttggcgtttataacccctattgtgtatgacttctacaaccatgaaatggagtcaacactgtttgtcgatctttttttcaagttcatacagaacttggcgtttatgggtgccctgcttttcttccttgggatgaagaactcaattccaaaacgtcgctccaagggaaggacaacaaaaaccaagacaaactgatgtcagtggttgtaggaggggaagcaattgggctcattatgtttgcatactatacaggaatagatgtcccacttttgttcttggtgcgccaattgaattgtgaattgggacttacagaacttagcatgtaggatatttaagttatcttccgcaattttattttcttatgttgcgatgtgttcttatgtcacattccattttgctacaagaactgctttgacagtaaaaaaatatattaagtcgcatagtctaaaaaaaaaaaaaaaaaaaaaaacctaaannnnnnnaaaaaa

SEQ ID NO: 5319 - DNA, 4927 bp, Zea mays
gtgaaacgggagggcaagaggctaaacagagatcttttacgaattgcacctgtttatataggaggctcctctgaaaatgaaaagtcatatcgtggttgggaatctgttgctgggctaagtgatgttattcagagcatgaaggaggtggtgatgttacctcttctctaccctgagttctttagttctctaggtcttactcctccaagaggtgttctgctgcatggccaccctggtactggtaagacacttgttgtaagggcactcataggggcatgttctcaaggtaacagaagaattgcttattttgctcgaaaaggtgctgattgtttgggtaagtatgttggtgatgctgagagacagttaagacttcttttccaggtagctgaacgatgccagccttctatcatattttttgatgagatagatggtttagcaccttgtagatccagacaacaagaccaaacacataattcagttgtggcaaccttgctctcgttgcttgatggtttgaaatcacgaggctcagtcgtagtgattggggctacaaatcgtcctgatgctattgatcctgcccttaggagaccaggaaggtttgatcgtgagatatactttccactaccaaccttcgaggatagatctgctattctgtcactgcatacaaaaaaatggccaagtcctatttcaggtgcattcctgtcatttgttgctagccaaactgttggatatgctggtgctgatctgcaggcaatttgcacacaagcggcaataaatgctttgaaaaggacatgcccattacatcaaattttacaatatgccgagaaaggagttcctcatgggcgagttcctctaccaacagttcttgtcgaggataaagattggctagctgctcttgcagctgctccgccaccttgttcaaaaagggaagcagggattgcttcaaatgatttggtttccactcctctagattcctgttttgtaccaagcctttttaaaccattggtacaccttcttatttctatgtatttggatgagcgtgtatggttacctccatcccttcttaaggcatgttgctctataaaggaagtggtattctcatccatggaaaagaatactgtaccccacactttatggccaacttatcttagttctttgatccaacaaaaagatattgcagatagaattggaacaatcttgtcaagctgtggccttatatctgcacaactaggaaatcgtggttcaatgttgctgagtgatgttaaaacacaggagaatttttgtggcagcagattaaatcccactggtttgcatatgaaaggagggctgccacataagttatcaggctttcgagttttagttgctggagcaccaagatcaggccaacaacacctaattcgttgtgttcttcatggttttatgggccagattgtaatacacaagcttgaccttgcaactatggtgcaggaaggaaatggtgatatccttagtggtctgacacacattctcttgaaatgtctaaaccttggaagatgcatcatctacatgcctagaattgatctgtgggcagttgataaggcccataatcaaatagaagataatatgctcaatactgggtcaggtcgtttagcatcctccaccgctgatcacaaaaaatgttcagaagtttggaatgcattgattgagcaaatggattcattgttagcttctgtatcaataagtgttctgtccaccagtgacatgaggtttcaagatcttcccagtggagtaagaggtttcttcagcacacatgttgtggatcagtgccttgtttcttcagaacatacaatacctagattttctgtgaatattgacaaccactctaattgggatgagatggttgattcatgtgctttgcagttatcacatgacttgattcgacatcatgttcaatttttgcatgatgaatctcataagaatgataatcatcaacaaaaagaagtgtttgcttccatgaatattagtgcagaaggtgaacttaagtccagtgagaatgagcgacccttgtgtggagttgcttctaaggagaatccaattcagctggctgcaggcagagctcagcaagagcctccaccatccaatgtggaagataaagtagaaaatgatcaatttttttttgaaggcatagttcaaagaaatccttctagtagacttgtaaaaggcagcgagtcatttgctattgttgcttttggaattcagatactgcagcatcctcagttctcaaaactttgttgggctacgtcaaagctacgggaaggcccctgcactgatataaatggaccatggaaaggctggccatttaattcctgtttgttgcagagcagcaccttacctggtaaatcactaaatggaggggacaatgttgtaaagggaaaggaaaagtctgtctgtgtgagagggctggttgctgttggcttattagcttatagaggtgtctatgggtctgttattgaagtttgtgctgaggtgagaaaggtgttgggactgttagtcggacagattcaaactaaaattttggaaaagagaaatcaattccggtattttcgaatcctatctcaagtagcttatctagatgatattgtgaacagttgggcatacacctaccaaagaacacatgttgatacccggacaggaacatcccgcatgaagagttcaagtgccaaagaatgtcaaaggaccaagtatgctgcaggaaccaatgtacaagttgctcctgttgccatccctgctgaggttcaagacattccagcccaacacactcaggatcatgaagttgttcctggtcctactgaggtgcaaggcaatccggttaagcatactgcagaacaacctggaagctattcgatggactgtgaccttgataatcatgtgaactctgtttccagcaaggatgcagtagaacacgatcatgtccattcagctttacctgatgtgcataggggcaatacacatgcagatacagtaacaaatgacggagaacctattggagcaaacaacaatgggaaagtgtccaggttaacctacggtgaagataaattcagaccaggtattcaaagatctgaaaaccacacagaatctatggaaggtttaggctgtttgcaaagggcaggagattccgttggatccccagcaagtattaacaatacagaattaccaaagaacaatgtttcttctgaagctcatattgatgataatgagttgaggagaaatgatcttgtgaatgatgttgaatcaaattcgatcgatggtaaacatgacaccatgatgaatctttcagttccaaaaatttcatgtctctacaaatgttgttctccatgtttccaatctatttataagatggttcatggtattatttcaaatactctaaggcctaatctgcattgcttaacagctgatgatatgcatgacattctgtcatcatggtgcttgaatctattagggtctgttagaaagttgtacagctcacatgatgaggccagctgcacagaagattttgttagaatgtccaataaagaaacccacttagagcattgtgcttgtcagagtgatatctatctttcaagagaatgtgtatgccacttggaaagcaatggggatgttgaaactgcaaatactgattgtcatcctctatcaggacaaagcttaagttttttctttaaagatggtgtatggatgccgttggatctcaccgcggaaacaaaacttcattgcagcttcaggagattctgtgtttgctcgatattaggaacagtttctatgctcagctagatcctcagttcatgatattgtctgatgcagttgcaaaagtacatatagtactctaatgctctaagtgtggctccagttgtgcacataacacaacatcatcaggatgtctttggttgattggaacttctcatccttgatgcaacttttgggcaagcttttattgcacataaattgcctctacctgttatggtcattagtggaaaactggctgttgtagttgcttcgtagactgaatatttaaaaagaagctaagatattagtcttcattttttttccaacgaagttacccatgtaggttggactgttgttgctgctggaaatttcacggttagatgatgactgagtgactgacgccatttcagttctcattgtaatatgtattatggcccaattaagcatcaagttgaaacatgattgaatcttatactcacattttgtgttgtaaaactattctggtcagtggtatgctttctaatggacaactgacattcagcatgataaatctttataggttatataagaacacactgtttagatgaggttggaattatatttttgtacttgcttataggagtgtgaactgtgaacaagtttttagtagaggccattggcaatagaaataaatttctaattgctgttggttgttgttattgtattgtgacttggcatgacctttagagttttacctctaagatttatctctttttttttggaaaagtatacagataaggcagtgaactaagctgaaatttatttagatgtttaaaggtttagcatattattgaataattcatatattatttgttctactacattatctacacacataattatctctacatttgcaacgtaaatcgcagtagtgtttgctaatgctacgtttgaggacattttttttatatttttgagggatacacaataaagtctaaagtgatttagaaaatgccgcgctaggggcggtcaatctctacttagcttctcggtttcaatttataattcatttaaccttaagtttgatcgacccgtcttattaaatttttttcataattattgttaatttttattgtgatgttgtttagcatataatatacttaaactttgttttttttcttgtttttttttcaaa

SEQ ID NO: 5320 - DNA, 925 bp, Zea mays
gtgccaagccctcgcggtcgacttcacttccccacccccacctcttctttccccctctccctcccctcgccgtcgctgtcgtcgccgtccgtgctagccatggatctaggcgctcccgcccgacggcgcctaccgatccgcctcttgctggtgtcgctcaccgtcctcgtggtcctcaccgcgcgctccagtgccgaagtcatcaccctcaccgaagagaccttctccgacaagataaaggagaaggacacggtgtggtttgtgcaattctgcgtcccctggtgtaaacactgcaagaaccttggaacactatgggaggacctgggaaaggttatggaaggtgcggatgaaattgagattgggcaagttgactgtggtgtcagcaaaccagtatgctcaaaggtcgatatacactcctacccaacattcaaggtgttttatgaaggcgaagaagtagtaaaatataaaggacctagggatgtggaatcgctgaagaacttcgtgttgaatgaagctgagaaagcaggcgaggcaaagcttgaagctgattgaggcaggggagtttcagcaagcatgtggcgagtggcgtagacaaggaacaatgctttgcaacattgtcttctatcctgtcatttacaaagccagtttacaggaaagaaatgaccttatgagctcgtatcagagtattcctcttccaaagtaactccgaatcagttcatagaagctgtactccattccatagtttttatcacattgacaaactctccgaatcagttaatagaagctgtactccattccacacattgacaaactgaagtaacgattggaacgcaaccacaaaaaaaaaaaggcacctcgcccgcccggttgcgcgtcttgcaacgataaaaaaaaaaaaaaaaaaaaaaaaaaaaaaaaaaaaaaa

SEQ ID NO: 5321 - DNA, 2446 bp, Zea mays
ccgaaatttaaagcccggtctaagcccgtctacgggccgtggtagtccgatccatattatttcgtgccggtccatgttttgggctcctgttttttgagccgtgctcgtagtggctaaaaaaacccgttccatattctcagcaatagtcgtcagtcaaccccagccactcatgttcatgagcacgcaaactgacatcgcttccatttattattatccacgtggagccttctcattggtggtgtctcgatctgttccaaccatatcaccattgtccgatcagcatgtacataatagccacaaactctggaaaatatctttatatacgataataatgatacatagcataataatagaatccacacatatatatgcatggtgtttggtagttcctcgctgtcgtcgaaaatgtacatactgctgttgacgagccgcatgtgaacggaaatggcattggtcacttaggatatttgaccataagcggacgactaatctcaaccatttataattattggaggcaaaaatgatgatgtggtgcacgaggttaggctattattgtataggactatgtcataccgatcgatggacggagaagcggaggacctcttttttaatgcaagactatactacaataacgacacacaatgatatttgatacctataaaataataaatttaatgtgaaattataataacaaatattacattttatcttagccaatatgtcgagaaagatatgagttgaaaaagaacttcacccttttttatagctcagtcagtcgctcgtccttcttcagttagtgaggcagtactatgtgaaagcactgcgttgtatgtggctttctgtcgtagtgctttcttatgaccaatctatgatgatgtaacggctcattcttgatgtaatgaccattggtaggcgagaagcggtgaaaatgaatagatctacgtgtgaagtcgcacgtacgtgacgcgggaaactgatcctttgaaggaacagagaagtcatgaaaaaattactcgtatgaagcatctcataaagatagtttgagatcatttcaatgggcatcttcttgcttgtcgtacttcacaaagatgctctcgtcaagctctttgtcacatgcacacactcaaagataggagttgtataagacattgttctgctgagccatcgtatatacggagaggaaaaccggatggtttagtacgtcggatgtgtgatgcggatgccatcgtcaccgctgcaacgccagcaaaatgacgcggcccgcccggcgaaatcattgttcaattgttgcagtcattcgtgtttatatatgccctcccgtctgacacgcagtcagtatctgtactaactattaagggggcagtgtagactgcccccgtctacgaatcccatccgccgctccgtctcctccgctgcgaaaccagccgtcacccgcacgccctcacgctccgcgaatcccccgccgcgcctcaagctccgcgtagcccacccatcgcaatcatgttcgccttttttccgccgccaaacccgtccctcccccagcatcgcagcttctctcgcctcctaagacgcatccctcgccccccatcacagctgcgggctcgcgcaagcatcgtccctcccctccacagcatcgcagtcgtgggcgtcctcccgcttctctcgcccggccctgtccccgccgtgctggcacccgcccgaggcacccgcaggaacgccatccatctaggttcaagagggccgccgccccattatcgtcctcatcactgacgcccagaacccccaggtccgcaagcagtacaccatccaggtcggcgagaacgagctcgtcctcaaggagctggagctgctcagcgatggggccaacgtgtacaagctcatcggaccggtgctggtcaagcaggacctcgcggaggccaaggccaacgtcaagaagcgcatcgagtacatctccgcagagctgaagcggatggatcgggcgctcaaagacttggaggaaaagcaaaacagcaagaaggaatccatattcaagttgcagcagaggatgcaggctgtacaagctaaggcttagacaactgtttgttggttgcaactagtccaaggccatgcttcatttcatcccaatgccctccagggtttttttttggtggggaggaatcaggtgtctgatgttctcgtctccacaacgaaaatgaaagaaaaacggttcctagtgaaatactaggctattctgtatgccctagtataaaagtgtgcctctagtagaactgtagaagatgtagttatcagtatctcttttgtattattggcccacgtttacttctcaatcgaatatttatgcgagggatgtttgtcaacgccttaggcttcatcttgaatttatgactttcattgcttgagtgggcccatgccaaaaaaaaaaaaaaaaactcgagggggggcccgg

SEQ ID NO: 5322 - DNA, 1870 bp, Zea mays
ccacgcgtccgaactacctaccaccactccggaagtcctgctagctccttgggggcctcgacgccggccgggctccttcctttcagtcagccagccagccatggagacggcctccttcctttcagtggcgctggccctggcggccctcgtccccgtctcgctgctccttgtgaaccggctcctctacggcaagctgcccccggggccgcggcggcggcccgtggtgggcaacctgttcgacgtgcagcccgtgcggtgccggtgctaccaggagtgggcgcgccggtacgggcccatcatgacggtgtggctgggcacgtcgcccacggtggtggtatccacgtcggagctggccaaggaggtgctcaagacccacgaccagcagctcgccgaccgctgccgggaccgctccaccgagagcttcagccgcggcggccaggacctcatctgggccgactacggcccccactacatcaaggtgcgcaagctctgcaacctcgagctcttcacgcagcgccgcctcgaggcgctcaggcccatccgcgaggacgaggtcaccgccatggtcgagtccgtctacaaggccgtcaccgcgcctggcagtgcagggaagccgttggtggtaaagaaccacctctcgatggtggccttcaacaacatcacgcggctggccttcgggaagcggttcgtggacgcggccggcgagctggacgagcaagggcgcgagttcaaggggatcgtccacaacggcatcaagatcggtgcgtccctctccatcgcgcagcacataccgtggctgcgctggctggccccggtcgacgagcaggccttcaaagcccacggcgaacggcgcgaccgcctcaccgtgaagatcatggaggagcacgccagggccctcaagcagcgcggcgcccagcagcacttcgtcgacgcgctcttcactctcagggacaagtacgacctcagcgatgacaccgtcataggcctcctctgggacatgatcaccgccggcacggacacgacggtgatctcggtggagtgggcgatggcggagctgctgaggaaccccagagtgcaggagaagctgcaggaggagctggaccgtgtcgtcggccgcgaccgggtcctgtcggagacggacttcccgaacctgccttacctgcaggccgtcgtcaaggagtccctgcgcctgcacccgccgacgccgctgatgctcccccacagggccagcgccagcgtcaagatcgccggctacgacatccccaagggcgccaacgtcgtcgtcaacgtgtgggcggtggcgcgcgaccccgaggtgtgggacagcccgctcgagttccggccggagcggttcctccgggagaacatcgacatcaagggcgccgacttccgcgtgctgccgttcggcgccggccgccgggtgtgccccggcgcgcagctcgggatcaacctcgtggcgtccatgatcggccacatgctgcaccacttcacgtggacgctgccgagcgggacctgtcccgaggacgtgagcatgatggagtcccccgggctcgtcaccttcatggccacgccgctgcaggccgtcgccacgccgcgcctggacaaggaggaactgtacaggcgtgtcccttcggacgtgtgagccgtcggcgtcctggcatctgctgcgttccctgttttgaaacctgctgctgctgttgcgaatttgtgtaccattaactattcgctggtgatgtacgtgtcatagtcgtgtacgagcattttgtgtactgcagaacttgatcgctgagcatacacttttgcccggtagtaatttacaatttcagcattgcaaattactaaaaaaaaaaaaacaaaaaaaaaaaaaaaa

SEQ ID NO: 5323 - DNA, 3177 bp, Zea mays
cattgggtacctcgaggcgcacggggccattgggtaccctggggcccgccgggcccgactccctcggctgcctcccgcagccgcccgctgctccggtccttccgaacgctggcctgttcttccctgcctttggcccattcgtcaggcggcccctccgcaggcgacgcaggcgcgggcacgacggcgcgtggccccgactacgtagacagctaaccggtctccgcctccggcccttctcctgtcgcccgattgagtcgctgctgcaactgccaacttcacccccggcgagctcaccacagtcttccggaaaggtgctatcaatttggaagatggcagatgaggagcaggccccaagctctaggaaaagggttgcaggtactcaaatcaacaaggataatccggaacctgatgatgaaggaacagaacaagagatgggtacatttaagaaagctactgaagaagttatggcaacacggaggattgtaaaggttcggcgccagcagacgtcatcagcttcttctaaccctttctctgcaatcagatttgcccccactgattctagtgctcaaacaagtgctcctgtcccagaggtccaaccttcagatgtcaaagttgacgagggaagcaatggtagcgggaaagatactttgtctctgcccgacaagactgctggctctggggtaaatacggactctagtgcctcaactgaagcaccacctcagcctgttgaaaccagtgacaaggcagaagacacaaaggacgaatctagtggagacaaagtggtagttggagaacccaatgaaggcagttgcatgccatctgaagttgagggcaaaacaaaagagggagatgctgaagaaaaggaaaggacagatgaagctggaaatatcgataaaattagcaaggatgacactgggaagaaagatggagatgacactgagaagaaagatggaggtgatgatactggaggtgaatcagagcagaaagggcaaacaccatcagcaacaccccttttctcgtttaagaatctgtcaagtggtcaaaatgctttcacaggtctgaccggaactggattttcaagcacatcattctcgtttggctcagcctctaaagatggctcaagtgctggtcccctatttgggctgaaagctgatggttcttcgttcccttcttttaatcttggtgctgccaccaatgggggttctgccacagctcttgctacttcagcagaggcacccaagatgtttgctatgacagagggccctgtcgaaaccggtgaagaaaatgagaaggctgtattcagcgctgattctgctttgtacgagtacttagatgggggctggaaagaaagaggaaaaggtgaactgaagctgaacgtccccgtatctgggggcgagcgagcccggctcgtcatgaggacaaaaggcaactaccggctggtcctgaatgcaagcctctacaacgacatgtcgctcaaggacatggacaagaagggcgtgacatttgcctgtatgaacagcattggggagtcgccgagcagcctcgctacatttgctctgaagttcaaggacacggccaccagggaggaattcaaggatgcggtggagtctcacaagacaagcaaggcacaggaactgccgctgaagacgcccgagaactctccgaaggcagcagaagtctgaagccgcacccgagtcacgcttgctcgtgtcttttgtacgtgtccaggaaggaaggaactgagagagtttctgttgttgcggagtttttaagaatgtcgcgtcatgacatatgatgtcctgagttgtattttgcgtacgggttccctagtgctgtttttgggaacttaccattactacaggcgcataatcttgggatcctggacaagggactcgttttatctatttgctcgtcttgtgctccgttatgttctatcggttaagctgcgcgtgacgctattatgtcatgaataaatgtatgcaattatacatgttcctgttgttatattccacaacatggaatgcttttttttttcaaaaaaaagccgacgcggccgcgcttgccctttgctggataagggcctgttttaaaagctgatcgagaaagccagaaaggccagcttggaaccagattgtaaaacataatcagaacgaactaattattagcaaccggggatcaataaagcgcagtaaatccaaatttgaggagtgaacttgttagagcaaccggttccaattcagcgcactaatctaaatttgaggactcatgccaaaaacacatgtcaaacccatggaatccggaggccctcagatctcctcttcggcctttgcacgggtgtcgtgttagactttttccagcagtttatccctacctaaaataggtaaagattgttattgtagacgcttcccacagtttacctatagtttacgtaaaatccacggcgtcgccatatgtactgttagtcacctttatcttaaacgcactgtgtcaactatcgatctgtttgttttcatcaccttcttcccttcccttgccaaatgtagtttatgttaaggaaacacgtgtgaagtaacaagagactctctctcacgaacaatgagtatatggacaacctttttttggcaaaaaaacaaccaaaacgtgagttttcgataatatagaaggctaacacctatggatttttgacagacaaacaatctccactaaaatccaaataatgtggtttatgtcaagtaaacatatgtgggttcactaatatgagtctcacactcaagatcaatgggtatatgaccaactttttgtctgaaaacaaccaaagcgtgaattttcgttaatataaaaaaactaacacatgtattttgaccgataaatcgaattcactaaaaaccaaataatatggtttatgtcaagacaacatgtgtgtggtaagtaataggagcctctcactcacgatcaatgagcaaatgaccagcatttttggccgaaaacgaccaaaacgtgagtttttgttaatatcgaaggataacacctattgatttttgacagacaaatgatatccaccaaaaacaaaataatgtgatttatgtcgaggaaacatgtctggggtaactaataagagactcccactcacgatcaatgggtatatgactagctttttttttacgcggaaacgacccc

SEQ ID NO: 5324 - DNA, 4441 bp, Zea mays
aattcgggtgctgtgttgtgctgtgctgcgtgctgtggagggggaggaggagatggggaagggggcaggggcagcggagccgtcgacggtggtgctggccgtcaacggcaagcgctacgaggcggccggcgtggctccgtccacgtcgctgctggagttcctccgcacccagacgcccgtcagaggccccaagctcggctgcggcgaaggtggctgcggtgcatgcgtggtcctcgtctccaagtacgacccggccacggacgaggtgaccgagttctctgccagctcctgcctgacgctgctccacagcgtggaccgctgctcagtgaccaccagcgagggaatcggcaacaccagggatggctaccaccccgtgcagcagcgcctctccggcttccacgcctcgcagtgcggcttctgcacacccggcatgtgcatgtccatcttctccgcccttgtcaaggccgacaacaagtccgatcgcccggaccctcctgctggcttctccaagatcactacctcggaggcagagaaggctgtctcgggcaacctttgtcgttgcaccggatacagacccattgttgacacctgcaaaagctttgcctctgatgttgacctcgaggacctaggcctcaactgtttctggaagaagggcgaagaacctgcagaagtcagcaggctgccggggtacaacagcggtgccgtctgcacctttccagagtttctcaaatccgaaatcaagtctactatgaagcaggtgaacgatgtccccattgcagcctcaggtgatggctggtaccatcctaagagcattgaagagcttcacaggttgtttgattccagctggtttgatgacagttctgtgaagattgttgcttcaaacactgggtctggagtgtacaaggatcaggacctctacgacaagtacattgacatcaaaggaatcccagagctttcagtcatcaataaaaacgacaaagcaattgagcttggatcagttgtgtccatctctaaagctattgaagtgctgtcagatggaaatttggtcttcagaaagattgctgatcacctcaacaaagtggcttcaccgtttgttcggaacactgcaaccataggaggaaacataatgatggcacaaaggttgccatttgaatcggatgttgcaaccgtgctcctagctgcgggttcgacagtcacagtccaggtggcttccaaaaggctgtgcttcactctggaggaattcttggaacaacctccatgtgattctaggaccctgctgctgagcatatttatcccagaatggggttcagactatgtcacctttgagactttccgagccgccccacgaccatttggaaatgctgtctcttatgtaaactctgctttcttggcaaggacatcaggcagccttctaattgaggatatatgcttggcatttggtgcctacggagtcgatcatgccatcagagctaagaaggttgaagatttcttgaagggaaaatcgctgagctcatttgtgatacttgaagcaattaaactactcaaagataccgtttcaccatcagaaggcactacacatcatgaatacagggtcagcttggctgtcagtttcttgttcagtttcttatcttcccttgccaacagttcgagtgcaccatcaaatattgatactcccaatgggtcatatactcatgaaactggtagcaatgtggactcacctgagaggcatattaaggttgacagcaatgatttgccaattcgttcaagacaagaaatggttttcagcgatgagtacaagcctgttggcaagccgatcaagaaagtcggggcagagatccaagcatcaggggaggctgtgtacgttgatgatatccctgctcccaaggattgcctctatggagcatttatctacagcacacatcctcatgctcatgtgagaagtatcaacttcaaatcatccttggcttcacagaaggtcatcacagttataaccgcaaaggatattccaagcggtggagaaaatattggaagcagcttcctgatgcaaggagaagcactatttgcagatccaatcgctgaatttgctggtcaaaatattggtgtcgtgattgctgaaacacaaagatatgctaatatggctgcaaagcaagctgttgttgagtatagcacagaaaatctgcagccaccaattctgacaatagaagatgccatccaaagaaacagctacatccaaattcccccatttttagctccaaagccagttggtgactacaacaaagggatggctgaagcagaccacaagattctatcagcagaggtaaaacttgaatcccagtactacttctacatggaaactcaagcagcactagcgattcctgatgaagataactgcataacaatctattcctcgacacaaatgcctgagctcacacaaaatttgatagcaaggtgtcttggcattccatttcacaatgtccgtgtcatcagcagaagagtaggaggaggctttggtggaaaggcaatgaaagcaacgcatactgcatgtgcatgtgcccttgctgccttcaagctgcggcgtccagttaggatgtacctcgatcgcaagacggacatgataatggctggagggagacatccaatgaaggcgaagtactctgttgggttcaagtcagatggcaagatcacagccttgcacctagatcttggaatcaatgctggaatatcaccagatgtgagtccattgatgccacgtgctatcataggagctctcaaaaagtacaactggggcactcttgaatttgacaccaaggtctgcaagacaaatgtctcatcaaagtcagcaatgcgagctcctggagatgtgcagggctctttcatcgctgaagccatcatcgagcatgttgcctcagcactcgcactagacactaacaccgtcaggaggaagaaccttcatgattttgaaagccttgaagttttctatggagaaagtgcaggtgaagcttctacatacagcctggtttccatgtttgacaagctggccttgtctccagaataccagcacagggctgcaatgattgagcagttcaatagcagcaacaaatggaagaaacgcggcatttcttgtgtgccagccacttatgaggttaatcttcgaccaactccaggcaaggtgtcaatcatgaatgatggttccatcgctgtcgaggttggaggaattgagataggtcaaggattgtggactaaagtgaagcagatgacggcctttggactgggacagctgtgtcctgatggtggcgaatgccttctggacaaggttcgggttatccaggcagacacattaagcctgatccaaggaggtatgactgctgggagcaccacttctgaaactagctgtgaagcagttcggcaatcgtgtgttgcacttgttgagaggctgaagcctatcaaggagagtctcgaagctaagtccaacacagtggaatggagtgccttgattgctcaggcaagcatggcgagtgtgaacctatcagcacaggcgtactggactcctgatccatctttcaagagctacttgaactacggagctggcaccagtgaggtggaagttgatatcctaacaggagcaaccacaattctgcgaagcgacctggtgtatgactgcgggcagagcctaaaccctgctgtagacttgggccagatcgagggctgctttgtccaaggaatagggttcttcacgaacgaggactacaagacgaattccgacggcttggtcatccacgacggcacatggacgtacaagatccccacggtggataatatcccgaaggagttcaatgttgagatgtttaacagcgcccctgacaagaagcgtgtcctatcttccaaagcgtcgggcgagccgccgctggttctcgcagcctcggtgcactgcgcgatgagggaggccatcagggcggcgaggaaggagttctcggtcagcaccagccccgcgaaatccgccgtcacattccagatggacgtgccggcgacgatgcccgtcgtcaaggagctctgcggcctcgacgtcgtggagaggtacctcgagaacgtgtctgccgccagtgccggcccaaacacagcgaaagcatagatccagcaggcctcagggtgcagtcggcgcactgccagagatgatgtgtgctgccctgatgtacagacagtacagtacagaggagagagaattgggggaactcaggaactgcgaggagcgatgaacagtatatagagtgaaaaataaaagtgcttcgtactaataatcactagaaaaaattatgcacatctcccacgcactaccggcacgactgttgaatattttgtaaaataagatgtcataagctatttattttctgtatgattagatcagcaaataatttaattcaagtataaaaaaaaaaaaaaaaaa

SEQ ID NO: 5325 - DNA, 1400 bp, Zea mays
cctcgaggccggccgggagacttgatcgccatcagtgtctactcttctaatgtttgaacgcagagcatcttccgcgaaccagtaaaaaaatgtggtttcatctcaattgtggacgagtttacatgcaacatttcgattcacataaagtctagcgtaccaggacgtcttgaatttcttccaaaatattccaaaatgggctatcagcatccgaaggcacgatgaatttgggagctggaactacagttcgtcaccctgttcattcattcagaaaagtgcggtggtttctcgtgaacgagcaacccagaaaaagtacacctgtcgcgtaagcgtcctcaggcagcagctccccggtcgcggtctctgtctctctgaagggaaagctctgtttccccttcccggtgccggagtcggggaaggtcaccgcgggcgcgagccgatggacagcaacaacctcctggcggcgtggccggtcctgggaccgggcgtcgccggcgccgtattcggcgcaggctggtggttttgggtcgacgccgtcgtctgcagcgccgccgccgtgccattcctccactacctcccagggttcttcgcctcgttcgccgcgctcatgttcaactgcgtcaaccgggaggacatcggcgatggctactactcaccgtacgacgactccgagtggagggtgaagctctggctttttatttcgtacgtggtgtcgtttgtttcgctggccggggcagtgggtttcttggttcaagatgcgcttacggatacggggccatctgcgtggactggcagtgctggcatcctgcagtgcgtgtttgtgttagtgagtgggctgatctactggacgtgccactctgaagattgacttaagaagtataggtatatatggccaaggaggaggaggatggagactgcttttctcagaagcgattgcttttccgtagtacgtttctggaggcacctttggaccgtgctttccgaaacgggtggaataaagagccattttctagttgtttcaagagagatgtagataagctgtactactattttacacgtgtttatagtcgtgtatcatgttgcttaaaactactttgtgaggtgttgttttggagcaagaaacttataggggtgctaagtactcgctctgtttctttttagctgtcgccggatagttcaattttgcactatacagcgacaactaaaatgaaatgaatggagtagtcaggaaacatcgttacatttttccctgttggcgaatttctcgtgcaaggtttgacaactctagtctgctcctgtacctcccgaggaagtttggtgttgccaacattttgtagacgcctagtcatgttgtgtctggttggttggaggcctgccaggcaacaacacatcttggcccaatc

SEQ ID NO: 5326 - DNA, 1793 bp, Zea mays
cattggggacctccctggagatagcatcacacactgacacacctcgcccccaccgcgacagtgattcggagcgcgaggcccgttcgcaggtcacttctcaattctcaaccttttcttctgccggcgtgcgctctctctctcctcctcgtgcggcagctgggtgaggtttccaggtcttggtcttgtcattcgccagcgacgagactcaccaggtttgcattgatcagtatggtgactgaaaatgcagatgaagaacgtgacactggtccagaaaataagttaagacacaattttcgattgggagatataacatgggttaagtacaatggctcttcatggtggccatcccaggtcattgatgaatcatgtgttggtagcaagcctaagaagaaagacaagtatgattgcctagttcggctctatggaacatgtcaatatttatatgtagacccttggaagtctaactcagaatttgaaatgatgctgaagcaagaaaacaagagcgcaatggaagcattccgtgaggtgcttgagaaggagctctctggcgttaacttgcgcagtgattatgaggatggttatgaagaggaagatgtcaactcaaaaggcggtgacaacaaagggacctcaaagaagacctcttctagaaaagccagaaaacaagaaggtctgaagcaacaatataatggagaggaagaccaaaatggtgggagcaatgcaactactggaggtgctcggaaaaaaaagggtgggcatgtaagacaatcaagtgctactcatgatgccattgataaaaattatagtggcagttcagctgaaggtttaaggaacaagagacagaagtctgctgctcaaagcgcttcggtaggcagaagggaagggttgaggcaacgatctgatgccaagcaacatccagatgcagccgagggcagtacagaaccactcgctgatgtacctggaagcgatggtgcagctcaaggttcaatgcaacatggaacttcggctcctcataccgaaataaaagcgatggtcaggaacatactgttcaaggacatcgttgacaaggagcacgatgctgagatggcttatgtggatgaagtgatcaatggcatctgtaacgctactgacagcatggtcggcggcggcggcggcggtgatgcttccgcgaaaggcggacgaggctccaagcagagcggcagcggagtggagggtgagtcgagcaatgccacagaaaggcgaagagatgaagcaactgagaatgccctcgccgtgaaagggaatacccctgggaacaacggcgatgacgccggggcagcttagcgcacgccaaaataggcagaacaggatcatgcaaaccctagctctgatccctccatcaggatctccgtttggcaggaatgaagaggttgcagccagccgtcaaaaactctaattcacttatgagcgccctaagaaacagtccgtgagcccccctagcgttttgcagtcctgtcctcttgcgcaccatgcctagtatcgctgctgccattcagcttgcttttgggagacgcctatatattgcgcctgatctgctgaattacctagcagttgctattaatctatccagaagacttggattgagtttgattgctatgtaaccacgcggttggttctgtacttgtacgcaactgtgcgacattggccaatgtggtgccgttgaacctttatgtattattgtgcacccccatcaccatgttattactagcccccttcggcatttcagaaaaaaaaaaaaaaaaaaaaaaatcgagagt

SEQ ID NO: 5327 - DNA, 1624 bp, Zea mays
cattgggtacctcgagggccggccgggattctattctgttcgggcacctcgaggccgattcctactccgagtcgccacctgcatttgtctatcggtcaggagcatggaggggagacggctttcacgccagcagttgcgctcgctaccggacgccgcgtccttctcgccggaagtcgcggccagcccggggctcgtcggctccggccagttgggtctcggtctctcggcggcgttcgagactctgccgccgattttggtagaagtgaatggctttacaaggacactgattttgaataggccaaagcagttaaatgcactctcctcgaccatgattatgggactcttgaggtgtttcactgcttatgagaaagacgatggagttaaattgttgattatgaagggtaaaggaagagcattttgtgctggaggtgatgttgctgcagttgttcgatctatacataaagacagctggaaatatggtgctgatttcttccgaaatgaatttttgttgaattacataattgcaacttataccaaacctcaggtttctcttcttagtggaatcgtcatgggtggaggtgctggcgtttctttacatggaaggtttagagttgccaccgataacacggtttttgcaatgccagaaacagctctgggtctctttccagatataggggcctcatattttctgtctcggcttcctggattctatggagagtatgttggtcttgctggtgccagattggatggtggggaaatgcttgcatgtggtctggcaactcattttgtccagtcaaatagtctgctatcgctggaagaatcacttaaaaaggtggatacttccaatgcttttgcagtgtgtggtatcatcgatcaatttgctcaacaaccatcactgaaagaaagcagctctttgaataggttggaaatcatcaacaaatgcttttccaaaaggacagtcgaagaaattatatccgctcttgaagtagaggcctcaaattcggcagatgaatgggttgctacaacaatccagtccttgaagaaggcttctcctaccagtctgaaaatctctctgagatcgataagagaagggaggacacaaactgttggggagtgcttgcagcgggaatatagaatggtctgccatgtcatgcgtggtgacttcagcagagacttctttgagggatgcagggctatattgctagataaagatcgaaacccaaagtggatgcctccaaggttggaacaagtgcatgatgaggctgttgaacagtatttctccagaattgatgatccacagtgggaagacttgaacctacctgctagacgctcccacggaagaaatatcgagtccaagctttgatcgaaggtcatgggagaaaggtggaactctggaacggagcctcggtagtggtcagaataacacattattgcacatcatctcaagtttgaagagtctgcagactattgataaaataaaaacatgaatgtgccatataggtcaacttatatcacagaaagaaactctttgctgtttatacgtggagactggagtcatatgcatttttaaataattataagtaataaaatcgaaaaagaaatcgttggaaaaaaaaaaaaaaaa

SEQ ID NO: 5328 - DNA, 1996 bp, Zea mays
gataaaccagcaatcgcatattcgcttgcctttcttgccctacgccgccagcttcccacggagccaccaccctccacttctcaccactgccgtctccttcccaaacccggctgccgtctcctttgattccacggcctgccacgcagcagcagcaaaactcctagtcaaccccgcgacccgccccctgctcatcctagcccaaaactttttttcttcgatctccgcaatctacagctttgcttctcccggctcgagcggctagggtttcgggagtgcgcggtgagacggcatgacaacgcggggagctaagcgcgcggccacctccgaccccgccgcacccgatttaccaagtaagagagtaatggacggaccctcttttgatgttcacagggcggagtcttcccatcagcatgtgatggcaggacccgctagtttagatcctcggcgggcggaggctgctagcaaacatgtgagggcacttaatacccagtttgcaagctgggttcaattgcagctgcaaaatcatccagctgaactttgggaggacggccttaaggattacatatcacatgcttctgaaatcatggaaaaattcaaggatgttgtcaactggctaaggcaaaatcaagcaggttcaatagttgtttcatccccaagctcactgaaggatgataagtccaatctgccagcagcagatgatagcaagctcttagtacagccaagttcagataacaaacagaaggctccaattatggcttctagttcttcatcttttcagaactcaagcttaccgaaccttttttcatcgccttctcagcaaaaaacaccagattacagtggtatgtttgctgacaagaagaacacgtccagtgatagcagtaaaccagctttccagtttggtggaaataatgtcatatttggtggcaagaaggatgcacctgttgacagcagtaaacctttccagtttggtccgaataatggcatatttggtgacaagaaggatactcccagtgacagcagcaaacctttccattttggtgcaaacaagggcatatttggcgacaagaagacgacaagtggtgacagcagtaatccttttcagtttggtgcaaataatggttttccaacatccaatgcaccatctattttttcttcagttgcccaaagttttaacccacagagtccacctctgttttcaatgaatcaacaatcagtcctcccaggaaaccaaaatacttctgaagcttcagctgacgcagatgaagatgctgaacctgagaagccaagcagcccttctgtaaagaaggcagaagagaagggggtagttgttgttcatgaaaccaaatgcaaggtgtatgtcaagcatgatgatgccactaagggttggaaagacattggtgttggtcagctctctatcagaagtaaagaaggcacagagaaagcttccaaagaatccactcctaccattgttataagaaacgatgttggtaaaatcctcctgaatgctctgatctacaaggggataaaaatgaaccttcagaagaatacggttgcttcgatatttcatacttcagatgcacaatcaagtgaatcagctggtgacacagttgtagctcgaacatacctgttccgattgaaaaatgtagaggaggctacaaaactatcgacagcaatcaaggagaatgcgccctcagactagttcttacggcatggattatcatctcgaatctctgcttttggcacgagctgtaagatctgaaggggacaccaccgatggccactgcggcaggctaaaagatgccttgcagagtttctttatttctttttttgttctcctagctgcatcaagatatcttgcttgtaacttgtaaggctgactggctggttatgtattagtactttcatgtaccatcttttgcattgacaagattattgagcatgcttgcagcccaaaaaaaaaaaaaaggcagcaaagcaagtggcaatggttcaagtc

SEQ ID NO: 5329 - DNA, 2102 bp, Zea mays
cgattgggtacctcgaggccggccgggactacgggcgacgcgggaccctcgagcccggccggctctcccacgcactccgcaattccgcatcacgcagaggcagagcgaccaacccagaaccccaccccaccgcccgcaaccgcaagctcagattccctccccaccccaccccaccccaccgtcccgctcactccagcccagcccgcgtccccacagcccagcgacagcgggcaccggcggcatccagccatgtgcggcggcgccatcctgtcggacatcatcccgccgccgccaccgcggcgggtcacggctggccacctctggcccgagagcaagaagccgaggagggctgcatccggcaggaggggagcccccgtggagcagcatgagcaggaggaggatttcgaggccgacttcgaggagttcgaggtggagtccggcgagtcggagctcgagtccgaggacgagcccaagcccttcgccgcccccaggagcgcgctcgccagaggtggactaaacactggtgcagctggtgtcgatggccctgctgcaaattcagttaaaaggaagaggaagaaccagttcaggggtatccgccggcgcccgtggggcaaatgggctgctgagatcagagatcctcgcaagggcgtgcgcgtctggctcggtactttcaactcccccgaagaagctgccagagcttacgacgccgaggcacgcaggatccgcggcaagaaggctaaagtcaacttcccggatgaggttcctacggcggtttctcagaagcgccgtgctgctgggcctgcctctctgaaagcgcctaagatggacgttgaggaggagaagccgatcatcaagctcgcagtgaacaatatgaccaactcaaacgcatatcactaccctgccgtcgtcggccacaacatcatacccgagccattcatgcagactcagaacatgccattcgctcctctggtgaattatgctgccctagtgaacctgtcttcagaccaaggcagcaactcgttcggttgctcggacttcagcctcgagaacgactccaggacccctgacataacttcggtgcctgcgcccgttgccaccttggccgccgttggcgagtctgtgttcgtccagaacaccgccggccatgctgtggcgtctcctgcgacggggaacactggtgttgatctcgccgagttggagccgtatatgaatttcctgatggacggtggttcagacgactcgatcagcactctcttgagctgtgatggatcccaggacgtggtcagcaacatggacctttggagcttcgaggacatgcccatgtctgctggtttctactgaggctgaggcccagcgactggtgcttgtgtacatagggggggacaaagggtaagagcctgcagtaacagagattggctctttctggtacttgcaatttctatcccttcaactctttcttccgcccccgtgtttcaggaataatgttctggagatgaagaaacgcttgcgtgggcgtgcctgcaggcacgcgtgtagtagctgcggtattagtatatatgcttagatgttcagtcacttcctttaagtacaatttggcgctggacatgtaccttattttactatgtatccgtgacaacagctatgtgtctgctccttttattttcttgtctttgcttcaaaaaaatggctctgaacattgcgagtttgtactttgtagacaatatatatatatatatatgtgtgtatgtgcttggtttgcgcgctccatcctcagcggcgcgctgtacatcgtcagtgccggcgccagcgacttcgtgcagaactactacataaacccgctgctgttcaagacgcagacggccgaccagttctccgaccgcctcgtggccatcttcggccgcaccgtgcaggagctctacggcatgggggcgcgccgcgtcggcgtcacgtcgctgccgccgctgggctgcctgccggcgtccatcacgctgttcgggcacggcgccgccgggtgcgtgtccaggctcaacagcgacgcgcagagcttcaaccggaagatgaacggcaccgtggacgcgctggcgcggcggtacccggacctc

SEQ ID NO: 5330 - DNA, 1969 bp, Zea mays
cattgggaccctcgaggccggccgtcgcgtcgcgtccctccttcctccctctccatttccaccaccaccccccgccccctctctctctctcttcttcttcttcttcaatcctccctccccgcgctggagttggaggagggagaggggacaagctttccggcgccgacgccgacgcggaccccgcgccgacacgatccggtggatcaagtgcatcacacctttagggaggccccttggacagcagtttgtgctgcaaattctatatagctctgtcgcagcatggcctcggtgggcgtggcacgctcttctttgggatttcagaatggcacaagttctagcagtgacccagatcgtcttcccaacgagttgggcagtatgagcataagggacgacaaggacgttgaagatattgtagtcaatggcaatggggcggagcctggtcatatcatagtgaccagcattgatgggagaaatgggcaggcaaagcagaccattagttacatggctgagcgggtggtaggtcatgggtccttcggaaccgttttccaggccaagtgtcttgaaactggtgagaccgtagctataaaaaaggttcttcaagacaagagatacaagaatcgtgagctgcaaaccatgcgagtgcttgaccacccaaatgtggtggctctaaagcactgtttcttctcaaagactgagaaagaggagctttacctcaatttggtgcttgagtacgtaccggagactgctcatcgtgtcatcaaacattacaacaagatgaaccagcgcatgcctttgatttatgcaaaactgtatatgtatcagatctgtagagccttggcatacattcacaacagcattggagtgtgccacagggacattaagccgcaaaatctcctggttaatcctcatacccatcagctaaaattgtgtgactttggcagcgcgaaagttctggtaaaaggcgaaccaaacatttcttacatctgttctaggtactacagagctccagagctcatatttggtgctactgaatacacaacagccattgatgtttggtctgctggctgtgtgctcgctgagctgcttctaggacagcctctgttccctggagaaagcggtgttgatcagcttgttgaaatcatcaaggttctgggcacacccacacgtgaagaaattaagtgcatgaatccaaattataccgagtttaaattcccgcaaatcaaagctcacccgtggcataagatattccataaaaggatgcctgctgaagcggtagatctcgtgtccaggcttctgcagtactcaccaaaacttcggtcgactgctttggaagcattggtccatccgttctttgatgaacttcgggatccaaacacccgcttaccgaatggtcgttttcttccgcctctcttcaattttaagccccatgagctgaagaacgtgccggcggatttcatggtgaaattggtccctgagcatgcacggaagcaatgtgccttcgtagggtggtgatctctggataagaggatgacgactcgatgattagctgaggaccaagttaatgtctgttagaaactgccggagatcgacattgccagatgtggtgtggtataagataggcaatatgtgtgattattttttgttcgaggttatcaccccccttgccccagaaaagatgagaagatgtcgatgtaacaagccctctgcgcttctgtaagtagatgagtgttgctgcatgccccctgggtacatgtatcggtttgagcagaattctgtttgcctgaatcgtgccatcaccacgcagggatccatcccttgtgtgacgatgttcagcccaacatttgtttatggattcaggctattcgttcatttgtactcctcgcatcctatggatgattaagcaatatttgcaatttttctaaaaaaaaaaaaaaaaaaaaaaaaaaaaaaaaaaaaaaaactcgagagt

SEQ ID NO: 5331 - DNA, 1655 bp, Zea mays
ggttacgacgaccttgccactacttgacgttttaaccggtctcgctcgagatctctagagaaatgaatgttgatcacaagctcccagagtcacggacttggtttcgcattcataagagcatctccaatattatgacttataaaattaccttataattaaaaaatagtatattttatagaatttaagttactaacaaaacatttcgtttcaacggtaaagcctcaaatataaattatagggcaaccaaatgtggtgtaatatatttaagttaattgagtgtgtatcctatagttttttgaccaaattttataaaataaatagttttttttctatacagaccccctttcaatctgagacatcagttaggatgtaatcaagtggacagagatcttagtgtgaaggcgaagcccgctgtccacagtccacacgaagctcagcgctcggtaggcaaaacgagcgagcgcggccttctttagagaaaaaaaaaacgcgaaacgcactcccagtcccagcgtcactgacgccgtccagagaacgcgcgcgcacattccccgcgtattctgttctgcgagacgccgcgagcctttaccggccggcgaacgaatccacgggtggctctgccttttgctattatagtctttaggggagaacagaaacttggcttacatctcaagcgcaccatggattggatttggcccgctcgcacacaagtcgcctgctgcttccgcacatcccacggcatattaccactcggcgaaccagaccagaccacgacgtcgcgcgcggccaccactgggctcgtcgccgatcgctataaaacgcggcgggtacctcgaggccggccgggaagccgagaccaagaaaacacaagtacagactacagagccatctttgatctttccagtccaagatgagcgtggagatcctcgacgggcggacggtgcagagcttcgtggaggacgagcgcgcgttcaactcgtccgtggacgcccgcttcgcggcgctggacgtggaccgcgacggccgcctctcgtacgccgagatggccggggagctcatggcgctgcgcgtgcgggaggcgcacttcggggccgacgcgccggcgcccgcggccgagctcgccgcgctgtacggggcgctcttcgcgcgcttcgaccgcgacggggacggcgccgtggaccgcgacgagttccgtgccgggatgagggaggtcatgctcgccgtcgccagcggcctcggcgtgctccccgtgcagatggtggtcgaggaaggcagcctcctcaagtgggccgtcgacagggagctggccactaccatgccagcttgaccagctcggctccatcagctagctgcctgacagtgtgcactagcgctagtgtcacctctagctgaatgggagttttatcacctatgtatgtatgtaaccgtacgccgagggtgtcggtctaatttgggctcgtttaacgttttcgtgtttgtagacctgacatgagtatgtaacgtacgcactgaaccttttttatcagtccgaaaagtagcgttttacacttttactccaagagacttcatgcatcgttgcaagatgcgagttgtaaaatggaattggagcaccacccacccaatctcctcattggaggcttggagccctccttgta

SEQ ID NO: 5332 - DNA, 946 bp, Zea mays
attacagtctcgagcacgtttcacgagcaagctcgttgagttcagtcactcgaaaatctatggggctggggctgcaaagtatgttaaggtggtcgatgatgctgtacatgagctgtataaggagtatgtggctcagccactcccactgaccccagcctatgttgaccaaggcgaagggaataatggaccagccaatgcgaacagcagtcaaggggctcctgcttccactggtgatgggcttctagacttcgatatgtacctttctgagatccaaagtagccagccctcgaaatctgagctggagcagtacctggatgaatccctcactccacgtatccaggagtttgatatcctgaactggtggaagctaaacacggtcaagtttccaaccctctctaaaatggcccgtgatatcttggccattccagtgtccatggtaagcagtggcagctctatattctgtgctggaacaggaagtcacatgctcgatgactacagaagctctctgcggcctgagattgtggaagcacttgtttgcgcgaaagactggctccagtattcaccacctgccaccgaggcaccgagttctgcactggtgaaggctcaaggatcgtaggtttgtcgtggtcactgcctgccttgtggaagcaaagcaagaatccatttacccatctgtcgtatctctgagtgtagttaactgtaggtgtattgtaggctgagattgtgaaccgattttgatatattctggtatttatcacgtaaaggtgtaacatgtgttgaactctgctgaactcgtggctgttctgatgtcgtctgaccctttgcagtttgcacgcttccctatgtgcttgtacaagccgtgggatgtatcttgtttttgtattaaatttgttttataccgtggattgatgtctcattaccctaaactaccaactaaaattggggg

SEQ ID NO: 5333 - DNA, 3966 bp, Zea mays
cgggaagaccttccgagcagcacctcgtccgcttggcaatgctgtggcatacgtcaattcagctttcttggcaaggacttcagtggatgcagcatcaagggaccatctcattgaggatatatgtttggtgttcggtgcatatgggactgatcatgctattagagctagcaaggttgaggattacctgaagggcaaaacagtgagctcgactgttatacttgaagctgttcggttgcttaaagcgactgtcaaaccatcagaaggcacaacacatcctgagtatagaatcagcttggccgtcagcttcttgtttaccttcctatcttcccttgtcaacaatgagtcaacaaaggttaatggtcccaacgggtcatgtagtaatggagccacaaacggtgcccttgagcactcaccagagaagcatcttaagtttgacagcaacgatttgccgatacggtcaagacaagaaatatttttaactgatgaatacaagccagttggaaaaccaattaagaaagcaggtgcagagatccaagcttcaggggaagctgtgtacgttgatgatatccccgctcccaaagattgcctctatggagcatttatctacagcacccaccctcatgcccatgtaaaggctatcaactttaaatcatctttggcttcgcagaaggtcatcacagttatcaccgcaaaggatattcccagtggtggacaaaatattggttccaccttcccgatgatgggagacgaagcactttttgcagatccagttactgaatttgctggtcagaatattgggggtgcctcggcgccggcccggaagtatgcctacatggctgcaaagcaagccattattgagtatagcacagaaaatctgcagccaccaattctgacgatagaagatgcgatccaacgaaacagctacttccaagtccccccatttgtagctcctaagccagttggtgattacaacaaagggatggctgaagctgatcaaaagattctatcagcggaggtaaaacttgaatcccaatactatttctacatggagacacaagtggcgctagctattcctgatgaagataactgcataaccatctattcttcgacacaaattcccgaggtcacacaaaatgtggttgcaaagtgccttggcattccatttcacaatgtccgcctcatcaccagaagagtcggaggaggctttggtggaaaggcaatgaaagcaatacatgttgcatgtgcatgtgcggttgctgcattcaagctgcggcgtccagttcggatgtacctcgatcgcaagacagacatgataatggcaggcggtcggaatcctatgaaggtgaagtactctgttgggttcaagtcagatggcaagatcacagccttgcacattgatcttgggatcaatgctggaatatcaccggatgtgagcccaatgttgccacttgctaccataggtgctctcaaaaagtacaactggggcaatcttgcatttgacaccaaggtctgcaagacaaatgtctcatcaaaatcagcaatgaggggtcctggagatgttcagggctctttcatcgctgaagccatcattgagcatgttgcctcagcactttcagtcgacactaacaccataaggaggaagaaccttcatgactttgagagccttgtggtgttcttcgaagatgctgcaggtgaagcttctacctacagcctagttacgatgttcgataagctggcctcctctccagaataccagcgccgagctgcaatggtggagcacttcaacagaagcaacaagtggaagaagcgtggcatttcttgtgtgccaattacatatgaggtcaatcttcggccaactccaggcaaggtgtctatcatgaatgatggttccatcgttgttgaggtcggaggggttgagataggccaagggttgtggacaaaagtgaagcagatgacggcattcggattgggacagctgtgccctgacggcggcgaaagcctcctggacaaggtccgggtcatccaggccgatacattgagcatgatccagggagggttcaccggtgggagcaccacttctgaaactagctgcgaagctgttcgacagtcgtgtgttgcgctggttgagagactgaagcccatcaaggagaatctggaagctgaggcaggcacagtggaatggagttccttgattgctcaggcaagtatggcgagtgtgaacttatcggcacatgcatactggaccccagatccaactttcagaagctatttaaactacggagctggcattagtgaggtggaaattgatgtgctgacaggagcaacaacaattctaaggagtgaccttgtctacgattgcgggcaaagcttgaaccctgctgtcgacttgggccaggtggaaggcgcattcatccaaggagtaggcttctttacaaacgaggagtacacaacaaactctgaggggttggtcatccacgatggcacatggacgtacaagatccccacggtcgacaccatcccaaagcagttgaacgttgagctgatcaacagcgcccgtgaccagaagcgtgtcctctcttccaaagcatccggcgagcctccgcttcttctagctgcctcggtgcactgcgcaatgagggaggccatcagagccgccaggaaggaattctcggtctgcactggtccagcaaactctgccatcacgttcgagatggacgtgccggcgacgatgcccatcgtcaaggagctctgcggcctggatgttgtggagaggtacctggagagcatgtccactgccggaccaacaaccactgccaaagcatagatccagcaggtgcaccgcccatggtgagagagcttaataggtctgtgtaaaacactgaacagcatgacatgccaagcttacatgtgttagctctgatgtacagaagacgaggtagcaatgggagctgtggtcttgtgaatcaggatccatgaacattagaggaaaaaataaagtaaataagtgtcgggcaggcaaatgtgtggatgaaatcatgtggttttgattggattttgaagaaatttttgcaatgaatctccgttcatactacaaaaaaaaaaaaagcctactgggtacatgggggataggattgtaccatccagctaggtttggccttgctgtctcgttgtgaccttcaccggtagctactccctgcgcacctatttgaactagcagagcagtgttgtgaccttcaccggtagctacttactccctgcgctgcgcacctatttgaactagcagagctaaaattactaaggaagacatatcaactagtaatgctatgggctaaattgctccaacctgtttgaactcagcctaaactaagatgggcactacatgtaaatagtactccatctgtttcgtttcaaaatagtagtcgttttagctctagatttttatttttatattcatatggatgataacgaatctagacacatatatagaacacatatattaattattgtatgaatctactacaagagtaatgaattttaatttgagacggagagagtaatgtactagaaaccataggcacggcgttgccgcaccagcttgggctctcccatcggagaacctgtaggagtgtaggtacagatgtacagtattttctattggtcaatttgttcttgtcattaatttttaaagtcgtatctgtaatggttgacgactgataagcagaaaagtgccaaaagtaaatggattgcacagcatacaactaatcatgtatgcatcgctctaaatctataatatagaatagggagagtgacgcatggaaatctcaaccatgcacctgatgataattacagttagtccttgcttatattatagaaatttgcctactgtcctcttaaagcaacacaaaagaagaataacgtttagctattgaatttaatagaccaaaggggagaactgagcaaacaaaa

SEQ ID NO: 5334 - DNA, 2530 bp, Zea mays
tattttacgtggtgccctggtcccgtcctcgtcagggcctcgccgtcgcctcctcttttttcccccctcctcgacggctcctcctcacaggctcacagcctcacactcacgcggagagcgctcgcgcgggcgcacacgcggaggggacgttcacaggagggggagggaggagatgccggggagccagaacggggggccgaggcctcggccggtcaaagccgagaccatccacgatcttgcgcgcgccggcgacctcgccggcgtccagaggaagctgctggagaacccctccctcctcaatgacaaaaatcccgtgatgtgtcaaacaccacttcatgttgctgctggctacaataatacagaaatagtcaagttcttgcttaaccagcaaggtacagaaacagttgatctggaggcaaagaacatgtatggggagactcctctgcatatggcagtgaagaacagttcttgtggatcaacaaatctactccttgaacatggtgcacacatagaagccaaagccaataatggcatgacaccattgcatttagctgtctggcatgcaattcaagctggagacttcagcacagttagcgtgttactaagctacaaccctgattgctttgtgaaagatgatgaaggcaaaatgcccttaaatcatattccaggaggagctggtagcgagaagctgctgaaactcctcactcatcatatggaagagcaaagaaaacggaaagctctcatgtcatgcctcgaagggaaagcaatgtcagagtttgaagaggcaatgtcacaaattgttggattgcaggagctaaaaatgcaattgcgccgatgggcacgaggaatgttttttgatgagaagcgacgggctatgggcttggggattgctaaaaggagagctccccatatggcatttcttggcaatccaggaactggcaaaactatggttgctcgaattcttggaaagctcctccacatggttggaattctccctactgacaaagtaactgaagttcagcgaactgatcttgttggagaatttgtggggcatactggaccaaagactaggaggaagatacatgatgcagagggaggtattctcttcgtggatgaagcttacaggttgataccaatgcaaaaatccgatgacaaggattatggtttagaagccttggaggagataatgtctgtaatggacagtggcaagatagttgtcgtatttgctgggtactgtgagccaatgaagcgagtcatcgcctcgaatgatggcttctgcaggcgggtcacgaaattcttctatttcgatgatttcagtacgacagaactagcagagatcctacatatgaagatgaagagtccaagtgactgtagcttgctttacgggtttaagctgcacccaagctgcagcattgaagccattggagagctgattgccagggagatcactgaagagcagaggaagcagatgaatggaggccttgtagacacgctgctcatcaatgcccgcgagaacctggattcgcggcttgatttcaactgcaacgatgccgatactatgatcacgatcacgttggaagacctggaggcagggcttcgtcagatttccagacaacgtcacctgcagtgacatgtaaatttaggagaattttttctcgatgatctcatgcttgtctccaagggcgaagttatggctgtatcgtctcatccaacgtttttggctattctgactgtgttgtatctagtcgttgctatatagcagtaaaatgcatgtggtatatacaattatacatcatgccctaacaatatttgacatctgtggaatagccagtaccacatacggatttcagtacgtgcataatcaattcagatttgatggttgaagtgattgaatttgaatcctaactaaaccttgacgaccgatttttctttttacgaatccattcctttacatcactccattgtcatctgatgacattcactttcaaaaaaaaaaaaaggagagagaagtggctgttcacatgccattgagctgtgctcaagtgcatgagcgcatctgtatgtggcaagaccatacatgcactaaaaattaaagcaagcaacctcatgtgcctccagaatagtgtagatcccagacttgccgtcttgcactgcattgccgttcggtggaatggaatcttgctttactgctagcagtggaaagtagatctgcagcgtggatgcctacgcaaggtctgtttggttgagttagtttttcttaaaaaaaactaatatgatctatggattataaagtgttcaacaagttacccacacccacatgatcatccaaaatactgtttcacactgtataatacactgttcatataatgaagtttgtaatagaagataagatgagagataggatggataacctgttggagatagtctaagggcctttttaacatggcttttgcatcaccagctctagctttggctcatctagaaaaatagctccttatttttaggagactttggaggatcattttgttgg

SEQ ID NO: 5335 - DNA, 2667 bp, Zea mays
tggaggtggagggagcgaagccggattgttacacggcggtcggggcgctctcagcgtgcacgaggttaggtgcattggatttgggatgacaggcggttgaaatagtgcactaggatgaggtccttgacaacccagtcctgggcactgcactgatcaatatgtatgctaagtgttggagcacaagagaggcatggatggtgttccagcagatgttggagagggacatcattgtttggaatgcgatgatcatggggcttggcatgattggccacgagaagattgcatttgtgcttgttggccagatgaagaactcgggtgtgaagctgaatgataataccttcattggattgctctgcagctgcacacatactagccttgtgaatgatgggcggcggtattttcataacatgactcatgtatacagtataagccctaggattgagcattatggttgtatggttgacctgttgagtcgtgcgggattgctggaggaggctcatcagctgattggtgacatgccaatgctggcaaatgccgttgtatggggagcacgcctcggtggttgcaagatccatcggaatgctgaccttgctgaatatgtgctgaagcagctcatccgactggagccatggaattctgggaactatgtcatgctttctaacatttactcgaacagtggaagatgggaagatgctgcaaagcttaggttggaaatgaaggcaaaggggattgagaaggtcgctgcctctagctgggttgagcttgatgataaggtccacaagttctatgttggggacgattcacatcctctttcagataagatctatgcaaagcttgatgaattgggccacggcataccttgtagattgagcccatagcagcccatatatgaagaaaaaacaaaagaaaaagagcccaacacgtaacaagcaacatctcgcattgattttgaagcgtgagaatctggtctgcttattctgttcgctgtgtttctttcgtccactcagctttccgcagccgccgttttacgttagccaattctgctgtcagcttgccgctgtccgctcgtcctttgagctttggttgtgtctcccaaatatcttgcctttttgttgcattggactcttctgtggttagaatggcagcacccaagcccatttctcgtcttatttctcacgtcattcttgatttggatggcaccctcttaaacacagattctgttgtaagtaaggtagtaaaaccatttattctaaagaatggaaaaacgtgggatagcaagaaagctcacaagctagttgggaagacaccttatgaagctgcagctgttgttttagaagactatggactcccttactctacagaagagttcctctcgatgattactccgatgttcagtgagcagtggtgcaacttaaaaccacttccaggagctaatcgactgataaaacatttaaagactaacggggtgcctactgctttggcttcaaactcaccaagatgtttcatagaagccaaaattttcttccaacaagggtggaaagagtctttctctgcaattgttggtggagatgaagtagagaaggggaagccatccccgaatatatttttggaagctgcaaagagaatgaactgtgctccttcaaattgcttagtaatagaggattccttgccaggtgttacaggtggaaaagctgcagaaatgcatgtcatagctgtaccttcaatacccaaaaagactgctgagttcagttctgctgatgaggtgatcaattccctccttgatgtgaggcctgaaaagtgggggttgccaccatttaatgattggattgaaggtaccttaccaatagaaccatggtttattggtgggcctgtgatcaaaggatttggccgtggttctaaagtactaggaataccaacagcaaatttacccgcggagaatttttccgacgtagtgtcagaacatacatcaggggtatactttggctgggcaggactttcaacgcgtggtatatataagatggttatgagcattggctggaacccatatttcgacaataccgagaagacagtagaaccttggctgcttcataatttcggcgaggacttctatggcgaggaggtgcgccttgccatcgttggctacataagacctgaggccaactttccttcgctcgagagcttgatagagagaattcacgaggatggaagagtagcagagaaggcactagacctgccaatgtatgccaagtacaaagactcgccttatctgagaaacccttcgaagcacgggagtagtactaccggtgggacccagtctgagatggattccaagtgacaacccccctacagggccactagataatatgttacttattttccctatggtaaatgcgtcggtgttgatgcagaaacaattggactctctgtgagctaactcgcttcttaattttcggaagtagatagtattcctcgaagtggtgtttttactttgtaatatagaaaaaaataaagtggggttgttgaaacttgagagtcaaattccgagacgttatgcacgttttgatttctgaattaatcgattggtatcacttgtactgtttttataaaaaaaaaaaaaaaaaaaaaaaaaaaaaagaaaaaaaaaataaaaaaaaaattatatttttt

SEQ ID NO: 5336 - DNA, 3027 bp, Zea mays
  misc_feature (841)..(841): n is a, c, g, or t
ccccgcgtccgcccacgcgtccgcccagcgtccgaagagtcaaaactctacatgagcatctcaaatgttgcacacaagcataaatgtacttgtttgagcttaaaaaaacttaacctgtagggggtaagacaacccctgggcacctggtccacccatacacaacggcaccatagcccatgtgagaatgactgcgactagggccgggccttgggcctgtttgtcatgggagtatgggacaaagtaggggatatttttaaccttagcctgaaatttactcccgtgaggagtcaaacacaggacctgtgtagtgctactcagaccccctatccattcgcctggtttgagcttatgctgtacgatttctgaacttgaaaatatgtatttgagatgaatatcccttgcggtaaaaactaggacaattatgcttgtaactttatttctgtaaatttgctttaagtaggctggacaatgatcttgaaattgtgacgtgtttgttttcattgcttcttgcttggggtctcaatttaccatgcttggtttcccgggaaagacaatatggattttgtaggaaagagcaaggtgatgttggagccttcggcactgggtctgccctcctgtgttgccctgcatatacttgtgaacgaggcagcatcatagcttcatgtttggtattttgttgttcaactgtgcaaggactgtagtcctatttttactcatcagggcaccacttcttgatcccatgctatctctacatagatgttcaactgtgcgaggactcttagtcctatttttgctcatcagggcactacttcttgatcccatgctacctctacatattctntatgaggctagcttatagtagattacttattccaaaaaagctgctcatttgtattgccaagagcagtttcaaaatctcttttttcatgttaattgcttttcacaggatcttcctaggcactatctgctaattgttctttatttcactcaaggtttatgttattaggtcatggttcacaaacatttttttcctcatgcagtatttgctggttttcagagttgatgctaaacatgcttatttaactaaactagaaatttgttaccgaggttagcgccaagctgcctatccttcatgcaattgagatttaatttgtccaattgtcagtttaacgggcaatggttttgaatttatgctgatgatgtaatttaattgcatatttgcctgctgacttgtgaacgaggcagcatcatagttcagtttggaaacatgtcatcgaagaagatagagttggatcacaaggacatggtccatgattctgccatcgactactatggcaagcgccttgccactgcctcttcagacttcaccgtgaagatcgtcaacattggtgctgcaaatgccccatcccaggtccttgcaacgctaagtggccactatggtcctgtgtggcgtgttgcttgggcccatccaaagtatggtgcaatccttgcatcgtgcagttatgatggccgtgtcattatttggaaggaggatgcacgaggcaattggtctcaagtccacgtcttcagtgacaacaagtcatctgtcaactccattgcttgggctccgtatgaggttggcctctgccttgcctgtgcatcttctggtggaagaatatccatcttgacgatgcaagctgacgggggttgggatactgcaaccattgagcgagcacatcctgtcggtgcgactgccatatcctgggcccctgcaacagcgtcactagctggtgcaggggagcttgtttacaagcttgtctcaggagggtttgactctgttgttaaggtctggggattcaacaatggtagttggaagctggagagtgctcttatctctgacatgcacacagattgtgtgagggatgtcgcctgggcaccagttttgggattgtccaagtcgaccattgccagtggttcacaagacgggaaggttgtcatctggaccaagggaaaggatggagacaagtgggagggaaagctcatgcgtgacttcggttcccctgtctggagggtgtcgtggtccttgactggcaacatattatgcatagctgctggcgagaacaacataaccctctggaaggaagggtcagatgggcagtgggaggaggcgatgaaggttgaaccataggatgaccggcaaggtttctgaatttcttgtagatccatgtttcgacaaagacaaagcttgctactgttttactagtgtttcgacaaagtttaagtttgccattgtgttttactagtgtttcctgcggatccatgtttcgataaagacaaagcttgacattgtgtttccatagacactcaaattcacatattttagtaattcctgatgagcaattatgctcttggatggatctggtgcgctttagactgacaaattttttattcaggaaacactagtaatgttacctattaaacattgtagcaatttttatttttaattgtgctgtcttggatcttggtccaccaaaaaaaaaaaaaacaaggtgtatttggtttagattctgaagcgaatctggaatctcaaccaaatgaggacaacagaatatattcttgaaaatatatgtatttttctagtttaatttagaattaccttcgatcgatgacttgtgttagcaagatatgcagtgtagttatgttatgtaggatcaaacgtggaagtctcatgtatccgtgatccatcatattactgagctcttgagctctctaatgttgtgttcatcgtctccatttcagatggaacttaagcctatgaccccttctgagcattgtttttagcatgtttttaaggttcaacaatttaaccaaacaataagatgttacattttaagaacaatgtcttcatgggcttgcacattgttctttggtagcaagggtgagtcggtcaaacaatagctttgttgacataatgttctgcattggtgttgtatagactttttggccatgaaaatcaaccatctgaatctagtcctaaacaaatctctc

SEQ ID NO: 5337 - DNA, 2001 bp, Zea mays
gttcggtcaccaaacagtcagcgcggggcaggcggtcagcgcagggcagggcagcctgaaagaaagcggcggcggcagcaggtcactggctcactgctctgtcctctcgtctccagagtccagaccaccgcatcgccatggcgccgccgcagacgatcccccggcgcggcctctttattggcggggcctggagggagccgtgcctcgggcgccgcctgcccgtcgtcaacccggccaccgaggccaccatcggcgacatcccggcgggcacggcggaggacgtggagatcgcggtcgccgcggcgcgggacgcgttctcccgcgacggcgggaggcactggtcgcgcgcccctggggccgtgcgcgccaacttcctccgggcgatcgccgccaagattaaagacaggaaatctgagctggctttgctggagacacttgattctggaaagcctctggatgaagcaagtggagacatggacgatgtcgctgcatgctttgagtactatgctgatctggcagaagctttagatgggaagcaacagtcaccgatctctctgcctatggaaaactttaagtcgtatgtacttaaagaacccattggggttgttggactgatcactccttggaattatcctctgttgatggcaacttggaaggtcgcacctgccttggctgctgggtgtacaactatattaaaaccttcagagttggcttctgtgagctgcttagagcttggtgcaatatgtatggaaataggcctaccaccaggtgtcttgaacataattactggtctgggccctgaagctggtgctccattatcctcacattcccatgtggataaggttgcttttactggaagtacagagactggtaagaggataatgatttcagctgcccaaatggttaagcctgtttcattagagcttggtgggaaaagtcctcttattgtctttgatgacattggtgacattgacaaagctgttgaatggaccatgtttgggatcttcgcgaatgctggtcaagtctgcagtgctacttctcgtttactgctgcatgagaaaattgcaaagaaattcttggatagattggttgcatgggcaaagaatataaaagtctcagatccactggaggaaggctgcagactgggttcagttatcagtgaaggacagtacgagaagataaagaaattcatctcgactgcaagaagtgaaggtgccacaattctgtatggaggtggccgaccacagcatctcagaagagggttctttcttgaacctacaattataacagatgttagtacgtcaatgcaaatttggcaagaggaagtctttggaccagtcatctgtgttaaggagtttaggacagagagtgaagctgtggaacttgcaaatgatactcactatggtttagctggtgccgtgatctccaatgatcaagagaggtgtgagcgcatttcaaaggctcttcactctggtattatttggataaattgctcgcaaccatgcttcgtccaagctccttggggagggaacaagcggagcggttttggtcgggagctcggagaatggggtcttgataactacctgacagttaagcaagtcaccaagtattgctcggatgaaccgtggggatggtaccagcctccatctaagctgtgaaggggcattcactccagggaatgtaatgcatcattaactgacagcatcagtcctgttaatggacaggagctcgtgtacagtacagtgctcgtaaaaaaagctctttgatggtaaagttgcttgctgctatcactactccagaccagaattcaggactggagagtacgatgtcatgagttgtactacttgttagtctgcactcttatcattcgaagtttggcagtggtgtgtagttgcacttggaagattgcaataataataaagataattggataattgatccattttaatcacttttctttaaaaatgcaaaaaaatcgtaaatattaaaaaattggggggc

SEQ ID NO: 5338 - DNA, 1612 bp, Zea mays
ccacgcgtccgtaatggtactagttgggtcgtgagaccaggaaaaaggaagtcagggatactttcgtcaagaccgaccggtgtcgtgtcgcctgctttgaaaaatcatacaacaaccaactaaaataacattgggtacctccaacgcggcccggacgcacacgcgcatcccggcagtcagtagcgcagctgcctctcctctctttggcccccggagccggagcaagagcgccgccaacagcccgctaccggcgccgtgtcatggcgggggcaggagacaaggtggactacgtcttcaaggtggtgctgatcggcgactcggcggttggcaagtcgcagatcctcgcgcgcttcgcccgcaacgagttcagcctcgactccaaggccaccatcggcgtcgagttccagacccgcaccctcgtcatcgaccacaggagcgtcaaggcccagatctgggacaccgccggccaggagaggtacagagctgtgacaagtgcttattacagaggtgcactgggagctttgctggtctatgacattaccagacgccagagcttcgatcatataccccgctggctagatgaactccgagcccatgccgacaagaacattgtgataatgctggttggcaacaagagtgatctcgaggagcagcgagcggtgagcactgaagatgccaaggagtttgccgagaaggagaacctcttcttcctggagacctctgcgctccaggcaacaaacgtagagagtgcttttcaaactgtcttgacagagatattcaagatccacagcaagaagaacatggtgtcggagccgaagagcaatggagctgccccagcaatgccggggacaaaggtccttgtcccaggtccggcgcaggaaatcccaaagagcaagtgctgcagttccatgtgatgcttctacgtttggtgctgggtgggttgaaaatatattcacgcaacattgtgttggttttaaatccctgctgaaatacttgggttttggcgggattgtattggaacaccggtgtattttagatatctgtcacaattgtgacatgagagaaggatgtgctgatgtattagttctcttgttctctaattgatacgttttatccctgctgcaaatatctgtagcaccgattgtttttgagatgcgaggtgtgaatttgccgtgtacaagaaataatccactcatctgtccggcccggtgcaatcatactttgtcgttggagctaaacggaaaagataaatgtaggccctgtgtagcatggttctaactccagatctctgctcagagttgaattggtgatccaaattctaggtatgtggaggcaagcgaaacggaggccgtcgtcgatccgacttgggcctgcgaagccagtgcacatgcagatctgtcacgtcagcttgcgttgtgaggcgcactgcaacgctgcactctctcctcccccttttctccgtgtacgaatatggtggttgcattaggtattaggggagctcttgaggggtaatctctcgcaccatttgcttgtaattgcaccgtcccgtttccgtctgtctgtctgtccaggcaagctaaagtatttaagcagatggtactgagagaactga

SEQ ID NO: 5339 - DNA, 3372 bp, Zea mays
  misc_feature (1150)..(1150): n is a, c, g, or t
  misc_feature (3327)..(3327): n is a, c, g, or t
gaggctggccgggcccccctctcccgtcgtccccacctcctcccggtcgcgcgcggtggccatgcctcccctcacaagctccctcctctcccgctccaccaccggcggctcctctacccgcgccgcggcagcggtcgcagcgatctccaggcccgccgcaccttcctcctcgtccccgcccgcccgctcgaccccgaggccgcgctccagcccggcgtcgcccttcgcatccggcctcgcgagccgcctcttcggcggccaccgcgccgtcgcccgctccgcgtcgtctgcagccgccgtcttcgagcgccggtttgcctcagcggcgaccaggaactcgtacgatgaaatcctgacgggcctcgctaagccaggaggcggagaggagttcggcaagtactacagcctgcctgcgctctccgatccgcggattgatcggctcccatattctataaggattcttctcgaatcggcaatcaggaactgcgatgacttccaggtcaccggaaaggatgttgagaagatcctggattgggagaaaagtcctccggtgcctcgtggccgcccgggcaagcccgctcgtgtcctcctccaggattttactggtgtcccagctgttgttgatcttgcttgcatgagggatgctatgagtaaacttggcagtgacccgaacaaaattaatcctctggtacctgtagaccttgttattgatcattcagtacaagttgatgtggcaagatcagcaaatgctgctcaggcaaatatggagcttgagttccatcgtaacaaggaaaggtttgggttcttgaaatgggggtcctctgcattccgtaacatgcttgttgtccctcctggatctggcattgtccaccaggtgaatcttgaatatctggccagggttgtgtttaacaatggtgggatcctttaccctgacagcgttgtaggcaccgactctcacacaactatggtagatggtcttggagttgctgggtggggagttggtggtatagaggcggaagctgcaatgcttggccagccaatgagcatggtcttaccaggtgttgttggctttaagttatcaggcaagctgaggaacggagttacagccacagacttggttctaacagtaactcaaatgcttcggaaacantggtgttgttgggaaatttgttgagttttgcgggcaaggcatgagcgagttgtcacttgctgatcgggcgaccattgcaaatatgtctccggaatatggtgcaactatgggtttcttcccagttgatggaaagacgctggactatttgaagcttactggccgaagtgatgatacagtggccatggttgagtcctacctgcgtgcgaataagatgttcgttgatcacagccaggttgacgctgaaagggtatactcttcctatctagaacttaacttggaagaggtagaaccatgtctatcaggaccaaaacggcctcatgatcgagtgacattgaagaatatgaagtctgattggctttcttgcttggacagcgatgtaggattcaagggttttgctgtccccaaagaatcacagggcaaagttgcagaattttcgttccatgggactcctgcaaagataaagcatggtgatgttgtaattgcagcaattaccagttgcacaaacacatcaaatcctaatgtaatgctgggagctgctttggttgccaagaaggcttgtgagttgggcctggaggtaaagccatggattaagacgagccttgcacctggttccggtgttgtgaagaagtacttggataagagtggtttgcagaaatatctcgaccagcttggctttcatattgttggctatggttgcacaacctgcattggaaattctggagagcttgatgaatctgtgtctgctgcaattactgagaatgatattgttgctgctgctgtgttgtctggaaacagaaattttgaaggacgtgtgcatcctttaaccagagcaaattaccttgcttcccctcctttagttgtggcttatgcattggctggcacagttaatattgattttgagaaagaacctattggcatctcgaaagatggaaaagaggtttacttccgggatgtttggccatccacagaagagatagccgaggttgtcaagtcaagtgtgctccctgacatgttcaagagcacatatgagtcaatcaccaaaggaaatcctatgtggaatgagctgccagtctcaacaagcactctctacccctgggatccatcatctacatacatccatgagccaccttacttcaaggatatgaaaatgagtcctcctggcccgcggcctgtgaaggatgcatattgccttttgaattttggtgacagcatcacaaccgatcacatctcacctgccggaaacattcacccagacagcccagctgcaaaatatctgaaggagcgtggcgttgaaaggaaggacttcaactcatatggtagccgaagaggaaatgatgagatcatggctaggggaacctttgccaacattcgtcttgtgaataagttcttgaagggtgaggttggacccaagacaatccatgttccatctggggagaagcttgcagtttttgatgctgctatgaaatacaagaatgaagggcatgacactattatcctggctggtgccgagtacgggagtggaagctctcgggattgggctgcaaagggcccaatgctgcagggagtgaaggctgtgatagcaaagagcttcgagaggattcaccgcagcaatcttgctggcatgggaatcatccctctatgctacaaagcaggggaggatgcagacaccctgggcctaaccggccatgagcgctacacggtccaccttccaaccaatgtgagtgagatcaagcctggccaagatgttaccgtgacaactgataatggaaagtcgttcacttgcacactcagattcgacactgaggtggagcttgcttactacgatcatggtggcattctaccatatgtcgctagaaagatagcggaacaatagattgtaccgtcgagatggttgcgatgcttgcggtgaatcgtaattggtgtaaacggtttgtttagtagtacaacccatttttgcggactacttataataacctctgagtatctcagagtgagctgtctgaaatttgatgaactgctacaattctggtgcgccatgaggatgggatccttttgccttctatgttaataatatgctaacttctgcaataccagatatacatttggcagaagattttgcacgctgtaaatgacactagtattaacactgatgcggtccaaaaaaaaaaaaaaaatgntatctgccaaaaagaaaaaaaaaaaaaagtcgacgcggccgcgaa

SEQ ID NO: 5340 - DNA, 2023 bp, Zea mays
aggtaaggatggcccgccggcgtggggaccctcgaggccggccaccgtcattccactccatcagtgggcagcgctctgctctcctccactcacgaactcactcactcactccccttgcccccatccatccgctagccactagctccagcaggctcgccgccgacactccactagtgctctgctctctccgctccactcacaaactcccctcgctccccccccccccacaaatcggcgatggatctgctgctgcggcggcggctgctggccgtggtggccacggcggcggtgctggccgtgtgcgccttcacggcggcggaggggttcgacatcctgcagatcctggggaagcacgacgagttctcgcagttctgcaagctgctcaacgagacgcacctggccggcgacatcaaccgcgaccgcacaatcaccgtgctggccgtggccaacggcgacatgggccacctcgccgccggccactactcgctcggcaccatccgccacatcctcgagctgcacgtcgtcgccgactactacgacgacaagaagctcaagcagctgtcgcacgccgccaccgccgcgtccaccttgttccagcgatccggatttgcccccggcatggcaggatacgtgaacataacgcagcaccgcggcggcaaggtgtcgttcatcgtggacgacgcggcggacagcgtcaagcccgtcacttacgtgaagcagatcgagagccaccgctacgactactcggtgctccaggtcagcggcgtcctgtcctccccggaggccgaggcacccgtcgccccgccggcgcccgtcaacctcaccgacatcctctccaagaagtactgcaagagcttcgcgggcctcctcgccgccgaccccaaggtcttcgacaccctcaacggcaccaaggacaccgcgctcaccgtcttctgccccgtcgacgcggcggtggccgccttcatgcccaagttcaagaacctcacggccaaggccaagacggccatcctgctgtaccacgccgtgccggactactactccatgcagttcctcaagtccaacaagggcaaggtcaccacgctcgccaccaccagcgtcgccaagaaggactacacctacgaagcggagagcaaggacgacaccgtcacgctcgacaccaccgtcgtcacctccaccatccaggccaccgtcagggacgacgacccgctcgccgtctacgcttgctccaagttcctgcagcctaaggagctgttcaaggccaaaaccgctgatctcgcgcctgcgccggctccacaagggcccaagaagaagagcaagaagaagcccaccggcacttcggcggcctccgcgccctcggacgatgaatctgcagatggcccgtctgccgacgacgactcgtccgatgatgccgcggacaaggctgccgccgcgccgtcgtacctgtccgctcgatgggtgaccgccgcagtgacgaccgccgtcgcgctggcgctggcggcgtaaggtgtgcgctcatatgctatgttttttttataacttattggaccccctatcttcttttcttttgtccaagtcgtgtcccttccttgttggtgaacaaaataagaagggctatttttgtttttttatatttattaccgcattccattaaaaaaaattagaggtgtgtgtgagtgatgtaagtcttgattttgttcattgggttgtggtgatcattttgtaatggtagtggccaatggaattggagagtgggttaagttttcacatatgatactatatataaggcatcatatggagtttagaggtgcagcagtgtttgttgtttacacatgctttcaaatgttagactatataagattttaccctgtacgtaacctattagaacgaataaaactaggttcgtttctttagaagtttaggatgtctccataataggaaggagagactctagcggtcggtgtcagagtcgatgtacaatggtgaaagtgtagaggcatcaatcttctccttaccgtgttagaat

SEQ ID NO: 5341 - DNA, 3078 bp, Zea mays
  misc_feature (1237)..(1237): n is a, c, g, or t
caattagccactgctaggctcgttaaatggttttgtacagaaactgcatctaaagttttgacaagtattgatttgaaattcatatgatcgtttacatcatatggaatatggatgatactattttgggaaaaaaccagagagtccttgttccacttgttctattcagtggttattgtttatttgtttttccacatagagccaattagtgtcattagcttgccaggaggactgcaaactatcctggagagcaggtgtgttactgtttaatatcaatgccctactggatataactctgtattttcacttataacatgttttatggattatgtgagctgacgtgctttatctggcatctgtatcatttcaaatttttcatctgatcctcctgtttctctggagcacaatggatacatatacattgctttctcatggcttgtttgtgagaaagaaatgctctaaacagacccaggtccccaggtgtttcggttgtttatggtggtcatgcattccaatttaggtccttctgttctagttgcacatatttagttctgatgtttatgatcactacagaggcaagtttttccttttaattcactattcccacctatacaacttggtggttgattaagagttgtattctcatgtacatagtctctgattcatgatacttattttatagttgggcccaaaaattaaggatctatattctctaaagtgtgcatagaccagacaagaagccagttaatagtgcaactaaagaagggttgtactggggaaagtaggtaaaaaggctaaaatttgggatccaaatacagtctgtgtcatgcataaattttatttggaatattcctgtatcatatatgttgaactctttcgcagcagaaggattccgaaaaccttgcatgaagctattttatgtgatatttgtgtctattatatgtaccttgtggctttgcaggttgctgtccaatcttttttgtgtgcttatatagtatcatttgaatgctgtctttgatgcttcattttatttaatttttttcaacttcagtaaagtagcatatctgatcattatatatcctgtcatttagcaatgaatagaatcttttagatagtagtggaagcacctttgtattatcatatatatctttggacatctattgaaactctattccatggtattgctattcaacatatatatatgtatatattcgtctagctgtccaatcttcattagccncatagttttgcgcgtgggcaacggtagatgggcatcactagcttgacgatcttgatcggtgagttgctccttccatttttcttggtggttatggaatttatctgcaatatgtcttgtgcttttgtatgtctgctatttgtgctgctattttttttctattatgtgcactatgtctctttgtcatatacatatacagatgtgcaaactatatttttgcagaatcgtgctaggaatccaatgtctggtggctattctcagcagggatatcgccctcctcgtcctcagtcaaactggggcccgccttctgtgccaccccagcagcctggctatggttatatgcagcctggggcttatcctggggcaccgccacagtatggtgcacctcagcaaccttatggtagctaccccccaacatctggtggttatcagactggatgggatcagtctcaaaaccagcaatctcatacaactccccctggtactgggtatgattattatagtcagcagcagcaacctcagcaacaatctgcccctgggacagctgcttctactgatgccactagctacaattatggtcagccttcgacgtatgcttcacagggatatgattctacctacactcagcagagtggtgggcagcaagcatatggacatgatggctacactggttaccagacccaagggcagcagcagggctactctcagcagactggttatgatcagcagggttatggcacatctgcttatggatcagctgcaagctcgacccaggatgggtccaactatggtggtcctggaggggccagtcaggcatctccagggcagcaaacatcaaacccagctgctggaagccaacctggctataccagccaaccgcccactagtgctgcagcaacttacccacctcaaggttcagctccatctggatatggcgctccaccatcccagtctggctatggcacccaaccaccacagcaagccggatatggtcagggcgcttatgggcagccttctccacagggccagaaacctcctgcattgtcaccttatggacaggctccgcctcctggttctgctcaggctggttacgggcagtatggttacagccaacctgcttacggtgcaccaccagcttaccctggtgcacccattgcaagccaccagggctatggccagcagcagtcttatggccagcagcagtcttatggcgatgcttatggtagtgcaagctatgggcagcctccagcctactctactgaagcaacacctcctgctgcatcccaggatcactctgctgcccctgctgcggcccttggaacaacagcttcgacagctcctgaaaacagtgggggcgcccaaacatccgctgaaacttgagcttcagcagctaattgggaacaaacattttccaagaccctgccgtgtggtttcctccgcgctgttgcttaatataattacgcatctaatttagggtctacaactacaagttatttatttttctgcctgttgtttttgacaccatgacttgctgtttccttgctatattgagtagtaccttgcagttattttattgctggcatatatgtctggactagtgatatatgtgtttgtgtggttacccttgttggaccgtaatggtctggacagataaatgcccatctatatgtattctgagccctgttatgtttgctctaccgtcggaggtttctatgcccacttcagctggtgatggttatgtatgaaatttggtttcaatattgcgtaagacttatgtatcggaccataaaaagtttaagcagcatgaaagtctgcctttttgttttaaaaaaaaaaaaaaaaaa

SEQ ID NO: 5342 - DNA, 1380 bp, Zea mays
gaatctccaagcacatcatgcgcccccccgaaaaaaaattccccacgtactagaccaccacccgttggctttctcccctcgcaccggggaacgcggctgccgatccgctcccgatcccctgccctcctccttccagccgactgagattccaccaaatcggcgcccgtgcagtccccgattcgattggcaagcacgattggccgctcctgatcagctacgggacagggctggatttgatttgatcggatccccaattgggtgtccgggtccgcgcgttcgggcgggcgggcgtgcgggcggggggattgctttagggtttcagcgggtgcggtcgctgtgtaggcgggtagggttttgccatggcggagaaaggctgcctgaaccggctccagaaggagtaccatgcgctctgtaaggaaccgccgccgcaggtcgtggctcgcccactgcccaacgacatattggagtggcactatgtacttgaaggaagtaaaggcacaccctttgaaggtggatattactatgggaaactcaaatttccaccggattatccttttaagcctccaagtatcagcatgacaaccccgagcggcagatttgcgccacacaaaagaatatgcttgtcaatgagtgactttcatcctgaatcttggaatccgatgtggtctgttgcaagcattctcactgggcttctgtccttcatgatggacgatgcactgacaactggaagcatcaagacatcagatgcagaaaagaggcgtttagcaaaagcttcccttgtctacaattgtgagagcaaaaactgtccgcacttcaggaaacttttcccagagtatgttgagaagtacaatcaacagctacaattggagaacactgctgcagagccggtgcctcaggagaatcctgcacctgctccatcccctgctgtccagcaagccccgaccgtggccaatagggcacaaccactggcggaggcgcgccgtgacaagaaccagaagaaggcggtgcccttctggatggtgctggtcatgttttcagttttcggggccgtgatggcgttgcccctaatgcaactttgacaataataaagacaataagaacgtgtgatgccagggccgtaattttgtatagttttccattggtttgtctgagtgactcagttggtcccctagactacctaccacctcggagtcgtattgatgaacctgtgatggtatatctgaagaacttttgttctcagttctcaaaaaagaaaaaaaacgccagaaggtccttcgtgtttgctttctgtttccgaaatcgtatacttaattttttttgttgcctcccagttcgtctttgtgatgtgtgctgacttcaaggttgagttcgcattttcac

SEQ ID NO: 5343 - DNA, 3146 bp, Zea mays
ggccgggccgggaccccatctccagcccctccgacgcggccccaccatctccacctcccggccgaacagacacggcccgccggcaaacgacaaatctcgcgacctctcgaaatgagcggtaccggaagcagcgtgtagcgcgagacgaacgccgccctaatccaaaccctagaggcgggaggaagacggcgagcgaacgcagcaacgattcctgatctctaatatcctagcacggcggcggccgcggccggatctaggggtaacgaaggatgtcggactcggcatcgatggcggccgccatcgaggcgcggttcagcagccgcgacctcatcggctgcggttccttcggcgacgtctataaagggtttgacaaggaactgaataaagaggttgctataaaagtcattgatttggaagaagctgaggatgacattgaagacatccaaaaggagatatctgttttgtcacaatgccggtgcccatatattaccgattattacggctcttatcttcaccagactaaattgtggatagtaatggaatacatggctggtggttctgttgctgatcttcttcaagctggtcctcctctggatgaaatgtctattgcatgcattctgagggacttgttacacgcaattgagtatctacattccgaaggaaaaattcaccgtgatattaaagcggcaaatatcctcctcactgaaagtggagacgtgaaggttgcggactttggtgtttctgcacagctgactaaaacaatgtctaggaggaagacatttgttggaactcccttttggatggcacctgaggttattcaaaattctgaagggtacaatgagaaggcagatatctggtctttaggtatcactgccattgaaatggctaaaggtgaaccccctctggcagatattcatcccatgagagttcttttcatcatacctcgtgaaaatcctccgcagcttgatgagcatttctcgaaaccaatgaaagagtttgtctcactatgtttaaagaagaatccagcagagaggcctagtgccaaggagcttcttaagcatcgtttcataaaaaatgcccgaaagactccaaagcttttggagcgaataagagagcggccaaaatttgcagcaaaaagcatggatgccacacaaaatgggcaaacacatgatgaagaggaggattttggtacaggcactatcaaggtcaataggacaaaagatacagctccatctttgagtcaaggaacagttaggaaatctgcagtcagagatttttctgatagatcagagggcacaggaactgtccgagttgtttcaaggcctcctcaaatcgcctccacgaaggatggtagatctgatatgcctcaaagtccaaaagcaccaatacgcacagctgatcgagaaaatcagtggaggtcatcagggactggatctgaagaatctctctctctcagagatactcagagcggacgagggagagtagaaagttctactgatgacaatgatcactctgtaagtgggtcaggaactgttgtgttacgctctccaagagcatctcagttgtactcaacagctagcaaccacagtgccaagcctcccagcagattctcctcttatgaagatatgtctaatagtgggacagttgttcggacccaaaatgaagacccagaaactccacgatcttcaaggtcaaggctggggatccaagaaaaaacatcaaatgctcctcttgaggatagtgccattaaccttgcagaggcaaaggctgctttgcaggctgggttaagaaagggaaatgctcgagaaagaccttttatcaacaggcatgaaaagggatcacatgagcatagatcttctggagtaaatagtcaagaggttcaaagtgaggatgtggacacgcagaaaggtcacaaattacggcaattacctgatgggcagtcagcctctcgtgctagttctgtagcttcacctgcagtctcatcattgctactcccttccctgaaagaggctactggtgacaagtttgatcggcctgctgttcatgccttccttgattccttgatggatttagaacgtgatatacctggatcatgcgaagtactggttggcagattgctacaccggctagggagctcaaaggattcctcattgcaaggtcttcaggagacggcgatgtcaattttcactaaggaacctgaacctccctctgaaaaagcaggcgacaagaagttagctaatatgccaccattggctgctcctaccgtgagcccactggcaaggttccttctcacaaggtggcaaaatcaagtttctcaagatcttaactctgtttgatccctgcgatgcagaaaagtgatttcatgttcgattcggtgtataattaatatttttcaatgtacataatgcaaactttagaactttatttcatccagtcggtctcaaccacctgttatttcatttgttttgttcatggcgaatactccctctgtccccaattaaaatttgttttacaattaatgtatgtgttgtatatatatgtttagtttcataatcatccatatgaatatggatgtaaaaatctagagctagtacgagtactatttttgggctagtttgagaacgtcatcttccaacgattttcattttctcaagtaaaattagtttattttttcttaggtcatgtttttctctttattttgaggaattggaatctaactaatgctacttttttttagaatgtgacattctataactatctaaagtttatatataagtatatctcaaatttgtgaatcgagacatggaaattgattctatagatttacatgctacttttttaatatataatttatattatactattttacttgcttctctatagtataaatgtagtgtatatctctcgcttatgatttaggacaatatacagacatattatatataaaaatatattaacttaattagttttgtttaaattataattattagaataaagtttaatttcaatgaaataaaaagggtcttaggaaattagagtttccaaacggagggagtaacatatttcttgccccttttccggtgttactgtcaccacaatacataacatatttcctgcccctgttcggtgttacttgaaagcatcta

SEQ ID NO: 5344 - DNA, 2427 bp, Zea mays
aagcgggtcaaaggccgggataagaatcagaagaaaaggacccgagcctagggttcggtctgcctcccacagccgccgctacgctttggctgcatcactcgctcctcttcggagcctccctttcgccggcggcgtaggaagagatggcagagcgtttgacccgtatcgccatcgtcagcgaggacaagtgcaagcccaagaagtgccgccaggagtgcaagaagagctgccccgtcgtcaagactgggaagctttgcattgaagtaacttcggcatcaaaactagctttcatttctgaggagctgtgcatcggttgtggtatctgtgtaaagaaatgtccatttgatgccattgaaatcatcaaccttccaaaagacttggaaaaggataccactcaccgatatgggcctaataccttcaagttgcacaggttgcctgtcccaaggcctggtcaggttttgggccttgttggaacaaacgggattggaaagtcgacagctcttaaagtgttggctggcaagctgaaacctaacttggggcgcttcaaaaacccacctgattggcaggaaattcttacatactttcgtgggtctgaacttcagaactacttcacacgcatattggaagataacctgaaggcaatcatcaaacctcagtatgttgaccacattccaaaagctgttcaagggaatgtaggacaagtacttgaacagaaggacgagagggatatgaaatctgaactgtgtgttgatcttgaattaaaccaagttattgaccgaaatgtaggagatctttctggtggtgagcttcagagatttgcaatagcagttgttgctgtgcaaaatgcggaaatctatatgttcgatgagccatcaagctaccttgatgtgaagcagaggctaaaagctgcacaagtcgttaggtccttgcttaggcctaacagctatgtcatcgttgtggaacatgatttgagtgtcttggattacttgtccgacttcatttgctgtttatatggcaagccaggtgcttatggtgtggttaccttgccattctctgtccgagagggtatcaatattttcttggctggatttgttccaacagaaaatcttcggttccgagatgaatctcttacatttaagattgcagagactcaagaaaatgctgaggagattgagacgtatcagcggtataagtaccctactatgagcaaaacacagggaaatttcaagcttactgttgttgagggtgaatttactgattcccagattgttgttatgcttggtgaaaacgggacagggaaaactacattcatcagaatgctggctgggttgttgaagccagacacggtggaaggaactgatattgaaattcctgaattcaatgtgtcgtacaagccccaaaagattagcccgaaattccagaataccgtgaggcatttgctgcatcagaaaattcgggattcctatatgcatccgcagtttgtgtctgatgtgatgaaaccactgcaaattgaacaactcatggaccaagaggttgttaatttatcaggtggagagctccaaagagttgctatatgcctctgccttggaaagcctgcagatatctatctgattgatgaaccaagtgcttatcttgattcggagcagcgtattgttgcctcaaaagttatcaagagattcattcttcacgcgaagaaaactgcatttattgttgagcatgatttcatcatggcaacatacttggctgacaaggtcattgtttatgaggggcgaccttctattgactgtactgccaacgcaccacagtctttagtatctgggatgaataaattcttatcgcatctcgacatcacttttagaagagacccaaccaactataggccacgtataaacaagttggaatcgacaaaggacagggaacagaagtcagccgggtcctactactacctcgatgactaatgaggaagtgcagattcttcttggagagccatatgtcgcataatctttccagagcatggaaaggagaagctactttgaagctaccactgcatcatggcatgtgacttgttgaataattggttgcaggagtagagtgcgccggttataacttataaagcagagcatgccgtgttgatactgagttttttgttggcttgacctatatgaagagaaggatcggtgttaaaatgagatttgcgagggggaactaatttctgtttttaagcaatactgtactgtcgttttgctatcaagtatatttgaccctcgattatatagattacattgaagtttttgggcaacaatgtgaaatcttgtgataaatctctgtgcttattggttatctgattgtaactcgtcctttgtaaactttgtttgaatgagcaagtgaactgattgtcgatagtttgttccaaaaaaaaccccaccc

SEQ ID NO: 5345 - DNA, 1518 bp, Zea mays
  misc_feature (1493)..(1493): n is a, c, g, or t
  misc_feature (1503)..(1503): n is a, c, g, or t
  misc_feature (1505)..(1506): n is a, c, g, or t
  misc_feature (1509)..(1509): n is a, c, g, or t
ccacgcgtccggactcctacaatcagcttaggatgcgatctcctcaggatttgaagggtaggctcactgtccaatttcaaggagaagaaggaattgatgctggtgggctgacaagggaatggtaccagtcgatatcacgagtcattgttgacaagagtgcccttctgtttacgacagtcgggaatgatttgacgtttcaaccgaatcctaattctgtgtatcaaactgagcacctctcatacttcaaatttgttggacgagtggttggcaaagctctcttcgatggtcagcttttagatgcccacttcactacctcctgcccctcccgcatacttggtgtcaaggttacataccatgacattgaagccatcgatccttcgtactacaaaaacttgaaatggatgcttgagaatgacataagtgatgttttggatctcacctttagcatggatgcagacgaagagaaactgatattgtacgagaaggcagaggtcactgattgtgagttgattcctggagggcgtaacatcagggttactgaggagaataagcatgaatatgtcgaccgggtagcagagcatcgattgaccactgccatcaggcctcagattaatgccttcctggaagggtttaatgaactcattccacgggagctgatatctatcttcaacgacaaagagcttgagcttctgattagtggtcttccagatattgacttggacgatttgaaaacaaatacagaatattctggctacagcatagcctctccagtcgtccagtggttctgggaaatcgttcaggggttcagcaaggaagacaaagctcggttcctccagttcgtcactggcacttcaaaggtaccgttggaaggttttagtgaacttcaagggatctctgggccacaaaggtttcagatacacaaggcatacggcagcacgaaccatctgccttcagctcatacttgctttaaccaactagacttgcctgagtacacgtccaaagagcagctccaggagaggttactgttggcaatccacgaagcaaatgaaggtttcggatttggctaatcagtcatgctcgtttgtccgtgagagtctgtacagatactgagcattgcaatgggcgagcagcacgtgtgtgctgatccttaccacattctgaactccacgtgtttgatggccggggagaacatagaagaatctccgtgggagaggtactgatgagagagagcgactattttgtgttcataatattcattaccttttttttagcttttttcggtcgttgcccagttcgtagtttttgccttacattggacttcgctccgattttttttctctgcttttccttcatagactggtgtaagctgtaaccgaacactgtcaaatgcaaatcatcttagggccccttcggttattactgaatggaggcatggaataatttctagccgtactgtttctctactatattaaagcatcagttttagtcccccncctctccccncnnccncaaaaatcc

SEQ ID NO: 5346 - DNA, 1806 bp, Zea mays
cattgggtacctcggggcccgccgggccggccgcccccggcccgcgcctcgctctctcttgtctcgcccgctagctcccatcccagcctcccaccgcgcccgcctgccccaacatcccccctccccgctccgctccacgcacggctccagatctgctacggcggcggccggtggacgccgcgccgcgcgtgccggaggcggtgacgtgagcggcggatcctgcccggccgtgccatcctggcgacgatgacagcgtaagcgggcggcggacgaccgcgcccccccggcccctactcccgaggtcattggcgtgtgctccttggcagaaaatggcgatgatggtggatccccccaatggcatggcaagtcaaggaaagcattactatactatgtggcagacactgtttgagatcgacaccaagtacgtgccgatcaagcccatcggaagaggagcttacggaatcgtttgctcatctgttaaccgcgagaccaatgaaaaagtcgcgataaaaaagataaacaacgtctttgacaaccgtgtggatgcgctaaggacgctgagagagctgaaactccttcggcacctgaggcacgagaatgttattgctctcaaggacataatgatgcctgcgcatagaaggagcttcaaggacgtttacttggtttatgagctcatggacactgatctgcatcaaataattaagtcatctcaaccactatccaatgaccactgccagtatttcctttttcagctgctccgaggcctgaagtacctccattcagccgggatactccacagagacctaaagccagggaacctcctggtcaacgcaaactgtgacctgaagatatgcgacttcgggctcgcccgcacgaacaacaccaagggccagttcatgacggagtacgtggtgacccgctggtacagggcacccgagctgctgctctgctgcgacaactacggcacgtccattgacgtctggtctgtggggtgcatattcgcggagctgcttggccgcaagccgatcttcccaggaaccgagtgcctgaaccagctcaagctcatcgtcaacgtcctcggcaccatgggcgaggccgacctcgcgttcatcgacaacccgaaggcccgcaagtacatcaagtcccttccgtacgccccgggcgcccccttcaccggcatgtaccctcaggcgcaccctctcgccatcgacctgctgcagaagatgctcgtgttcgacccgtccaagaggatcagcgtcaccgaggcgctggagcacccgtacatgtctccgctctatgacccgagcgcgaaccctcccgcgcaggtgccgatcgacctcgacatcgacgagaacctcggcgtcgacatgatcagggagatgatgtggcaggagatgatccactaccaccccgaggtcctcacgagaatcagcatgtgagtatgtgatgtgaccagacaggcagcaatgaaacatgtggacagaggtctgctgcgccaggatcatcacatgttcgcccttcttacgagcttaactgcgattacggcaccgagtcgaggtatcactacatgtatcggaaccgtcaggcggtctcttgtgtaaatatgcgctgaataaaatgtgtggcaatctcttgttttttgggttgtacatggacctcgctgttgtacgagtctgtgaagtggaaccctggtactaagacctgtaatttcagaccctaatctgttgtatggaaatctgaaggccttgactcccaaaaaaaaaaaaaaaaaaaggccgctcgcgatctagaacgggctcgtgcaaa

SEQ ID NO: 5347 - DNA, 2966 bp, Zea mays
cctcgaggccggccggggaccgatcctcggcaacggatatctcggctctcgtatcgatgaagaacgtagcaaaatgcgatacctggtgtgaattgcagaatcccgcgaaccatcgagtttttgaacgcaagttgcgcccgaagcctcattggggaccgcgagcccgccggccgggaagccgaagacgcgaccgacccaggcaggcaccactccgctcaacgcaccgggcggcacccaaatcccaaaccctagcacacgcaccatggcggcgcagcagaagatccggtggggggagctggaggaggacgatggcggggacctcgatttcctcctcccgccccgcgtcgtggtcggacccgacgagaacggcctcaagaaggtcatcgagtaccgcttcgacgacgacggcaacaaggtccgggtcacgaccaccacccgcgtccgcaaactcgctcgggcgcgcctctcccgcagcgccatcgagcgccgccagtggcctaagtttggggacgccctcaaggaggacgcgggctccaggctcaccatggtctccaccgaggagatcctcctcgagcgcccccgcgccccagggagcaaagctgaggagtcagctgcatctggtgatccgctggctatggcgagcaagggaggtgctgttctcatggtttgcagaacctgtgggaagaagggcgatcactggacctcaaagtgtccgtacaaggacctggcaccaccgactgaaactttcacggacaggcctccaacgtcagatggccctcctgcaccaggtggtcctgctaagggagcatatgttcctccaaccatgagaggaggtgctgataggactggagactcgatgcgccgcaggaacgacgagaattccgtccgtgtgaccaacctctcggaggacacccgcgagcctgacctccttgagctcttccgtgcctttggccctgtcagccgtgtctacgtcgcggtggatcagaagactgggtcgagcagggggtttgggtttgtcaactttgttcacaaagaggacgccgagaaggccatcaacaagctcaacgggtatggttatgacaaccttatcctccgagtcgagtgggcgacaccaaggcccaattagttttgccgctacctgctagaatcgcatatttctgttgaattatatcagtatgtttgtttgaattactggtacctgagtcatgaatttatcttgttggaaaaacctgttatgtgtggtttggttggacgagaataactatactcgcttcttttatattgagttcgcatgccgtttgttgtcagcaaaaaaaaaaaaaaaaagcaccacgaacgggtgatgattgtatggctgaacaaagcaaatttcatggtcgcaaggctggcaccttgcatagccttgaatgcttgatcctttgggtcagagactctaaaggttcagtggtttactagcatctcattcgatcaaaagataacaaaaaacgaacgactaaaccttatcagaaaacttgaaacaatgaccaaggagaattccttgttggcgtgagtgttctttgttcgagtcatctatatctataatgatctattaagaaactaatgtgggcatctgatgatactactgtttcaccattcgcgctgacgctctgggtccacccgccacatcgcacaaaaaataatgcagagcgagcattcgaatccataccccttcaccaccaaatcacacattttttagtgtttagaaataaataatagttatatttgagtatataacaaccatagtaaagcacagacttctggctagttttagatagatttcaccaggggttcagggatttgcctaaagtgtatgcaggaacttgttctcaaagacaggaagcgtcgacactcgatgagaatgaggcctgtgtgatcacaagtgcctacaaaagcaaaccgaatctggattaagaaaaaaaacagattattttttttgaaattcgcaggagagctacgtgtcattttattaaaaagaaagaagttatcagagatattaaaacctcaccccgtttggagctctgtccgcattcagcgggttctccagccatcctgataccgacgcgtggccgcatcctcggacccgagattttaattcgctctgtttgagtcgtgcattgtgtccgttgttcacatccatgcttctttgaatccttccccgctccctcgtcctcaccggcagccgccgctggcgtcgcccccatcccgccatcttccttctcgggctgccccgcgagtttctcctcgcacctgcgtctcctcgcaccccacagacgtcacaactgccacctagcctgccccctcctccgcgccaccctacaaccactcatgtcgtcgtgtcgctggcgtaggcgttgccgcccactcctaagccaacgccgccggtcgtcacttcaccgacgcttaggcacacccgtcctctttcgcaaccccctccaccgggatccatacctcttcttcccaacaacaaactcgccgccgccaaccccacctaccgagacctagccctcctctggtgacggcaacctctcgatgttcccgtccaacatctccgccctcatcgcggcgaccccatatgcttccggctcccgccacttcttcataagaaataaacctgctcgcatactctcttttctcttcccctgtctgtcgtgccgtctctcttcctccttccacaggtgtcgcctcagtccgtatcgacccctttccgatccccgaggcgaagctacgactctgccatagcgtttgagaagatcaaggtctccaacccaatcgtcgaaacagacggtgagatcccatcgcttatctttcaatttcttgatttggacatcaagtactacgatttaagggataatgcaccgtgaagcaattgatgacaagatcaccatgaaatttgagagtccacttcatcatatgtggctgagggcatg

SEQ ID NO: 5348 - DNA, 2294 bp, Zea mays
  misc_feature (7)..(7): n is a, c, g, or t
cgcccanaactcccgaaaccagcccaacaccaaagctcattccgcgcccccccggcccgcccgccctaagaacagagcggccacgctgaggagtgaggaggaaggtaggaggagaaccgtgagcagagagacatggcgccccaccaccagcagcgggcgctgctcctgttcccactcgtcttcctcctcctcctccttgccccgcccctcgccggcgcgtggggaaaggagggccacatcatggtctgcaagatcgccgagaagtacctgtcggagaaggcggcggcggcggtgcaggcgctgctgccggagtcggcgggcggggagctgtcgacggtgtgcccgtgggcggaccaggtgcgctggcactaccactgggccagcccgctccactacgccaacaccccccaagtctgcaacttcaagtattctcgggactgccacaattctcgtggccagcaagggatgtgcgtcgtcggggctatcaacaactacacggaccagctctacagctacggccagaagacttcgtataacctgacggagagcctgatgttcctggcacacttcgtcggcgacgtccaccagccgctgcacgtaggcttcgaagatgacgagggcggtaacaccatcaccgtccactggtaccggaggaaagcaaacctccatcacgtctgtgcctgctgcacctcttcgatgccagatttcagatgtgtatactcaccaggtatagcccgtctgagtctctgagagtcagaatcctgtgtttttgctaggtgtgggatgtcagcattattgatacggcgatcaaggacttctacaacaagagcatggataccatggtagaggctctcaagatgaatcttacagatggatggtctgacgacatcgtccactgggaaaattgcaagaacaaacacgcgacctgcgcgaacgactatgcgattgagagcatccattattcctgcaactacgcctacaaagatgtggagcaagacatcactctaggagatgattattttttcagtaggtacccgattgtggagaagaggttagcgcaggctggaatcagattggcgttggtacttaatcggatatttggtggaggtgaagcggatgatataccactacaagtacagtaacagctctaataaaaggaagcatagctattacaaggatttgtccattacgtcgtctatacatcaataaattggcatgaatttgtaactccattgctatacatcaataaattggcatgaatttgtaacaactgaaaggatcaagatgccacccttgaattgcacttctcaaaatttcttgaacaaaataaaatttataatcaagttcaacttttctcttctgactcccccccccccaccgccttttgcactcgaaatttcattcctatactaacatgacaattctagcaaagtaaatgtgtaaaatcaattgttcaaatataaatgtgtaaactaaagaaggtattaggaaatccttggtgttttgacgatgtatcatagagtcggcactctccactagttctcgttggagcactcatataagagcgttgctctccttcacaaggactaagtgctctctgtgagccggtttctttgccactggatgaacatgaaccactcacaaccatgcataagcttgagttggatcactcacatgctctctaggtgatcatcaaacttttgattgccaccaaaccgtctaggtgatgtcgatcaccaagagtaacaattactaactttcattgttctgaccaagtctaataaaggtggtacatgcatacaaactactattaatgcactagtgaggccactaatcatgtgattatcatcactaagtccctcactaggtaatggatattcttcactctcaaatggtttcttcaacatttgaaatgggcaagagacctcatttggctaagttggagagtataaatagccccaagcaaaagaactagtcattacaattcaacttagcaagtcgagggcacatgacatgtccaatgcataccaactccctactctagacatgtctaggggtggtaatggatcactatccaaatacttattcataatttatctaagcccttaattaattttagttcaaaaatggatagaaatagagcatgatcctacaccgagctgatctttaaattttatcatgtgaaattaagagctcattaccacccctaaacatgcctcgtgtttcctcaatggctagtttcagaaactagtcgttattgtactcttatccgataagtatagcctcgaatgcat

SEQ ID NO: 5349 - DNA, 7355 bp, Zea mays
gcggtggttctcgcctccctgtgccgcggggtgggcgactgcggttcgagtcttcaaaagccgaagagcacggggcagcgggcccatctgccaggccgccaccaccaccgccagcacccactcccttttgtcctagctcttcgcgcggtacgatcctcctcggaccacgccacaccgggagaggagagcaggaggccaccgaccggcgaccgggccccgcgtgtcacacgcagacgccaccagccaagctctccgcgggtggcggtaaaagagcgccatcacgcgggcgattacggaggggcaaaatctttttttaccgccgcgcagcatcgcagtggcagctcgtgagtggagggaggcggggatcattagtttaagagggcagattataaaagccgggctgtcgctgttgaggccgagcacagcagcagagcaccatcagcaccagcacgcccacttgcctcctattatttgcgccagagggcagggcagggcagggcaggggccttggcgctacccccgttcttatccccacctcgtgcctcccctcctccccccttcccctctctcgcccctcctccctccgtctcgtctcccaggtcatggcaaaagctggagcaccgggaaaaataacaagtgggagataaacaggaagagctaggtgagttcttcctacctgcctggacctcctacccttcccagttcttgtgtggctggtcctccttttcttcgctgatcttcttcttcccttgctgcttgtgctactggagtgtggtcgcctgattatctgatggatatgtagagtgatattttttttccccaggagatcttttttcctctctagattttttttttcagtatcctgtagcttcccgaggtggccaattcccgtttgagttccgatccttcttttcccttgctgatgttctgtcctccagcgtaatagctgcggctaaatccacgacagagttccaaggttgatgccttcgatgattttgcagctcccatccaaaaacctgagtttcttacatctctttcctcttttttttccccttctacaagtttcggttggatctcaataccacaattagtcaaaggctcagctcgttctacggttctaggaagtgtctaacagccgggtgtgatggaaacattctgttcctgcatcatcttcggaggcgcaaaatttgaccagttttcgttaggtttgatacgtgtttagtccatttagtcccttgttttcttccctttcatgtatgaccttgattccccctttcaagcacatgggtgcatgttcgctcggtccccctgtcagttcgtgcttggctggttgaaaaaaaaatgactacttatttttttttcctgaaaagctttccttccctgccctttgatctttttttagctttcccccttgtgattcaaccagagcttgtgaacatgctttcgtaaaaaaagggggaaagatgcaactttacctgcttgttccgtgaaccggcatatgagtagtttttttatggaactatttatatattctcataagttttcatgctttaattccttcttccacaagtatgtgtgatgcatatttctcacccatgctgtgtaatctgtttcttttatgtcgaaacaataagggccatgctatatttggccatgtatagtttgatcagatcaaggccctgttctgtttcaccagacacatgccaggttgctaactttggcctcccggctgttgcttcagtaggcaatcttgcctttttctgctacacgattgtctcctgtagctgtgtagatctatgatgccaaggcaaaaggccctcatgtaatcaccaaattaagatgccacagtagcgttcactggaccatctttaattaccttttttactaacacgcaatcgtgttgcacatgtttacccttgccctgcacttattgtctgtgcactgaattgctgacagtaaacacagcagctgacgtgttcgtcgtgttgcttccgcgcaggtgaatacttggagaaaaaggtcccccacaccccccacgcaggtgaatactacaagtagcagtacaaggaagagagccaatctgcccgtgactgccagtgagttgctcgggtgtggtggttagttgaggtcacgatgatgggaggcgggctgatgatggatcagagcgtggtgttccctggcgtccacaacttcgtggatctcctgcagcagaacggcgacaagaacctgggcttcgcctcactcatgccgcagacgtcctccggcgaccagtgcgtgatgggggagggtgatcttgtggacccaccgccagacagcttcccggacgccgtggaggacgacagcgatgacgacgttgaggacatcgaggagctggagcgccgcatgtggcgcgaccgcatgaagctgaagcggctcagggagctgcagcagagccgcggcaaggatcccatggctagcggtgggggcctggccgacggctcatccaagccaaggcagtcgcaggagcaggcccggcgcaagaagatgtcgcgcgcgcaggacggcatcctcaagtacatgctcaagatgatggaggtgtgccgcgcgcaggggtttgtgtacgggatcattccggagaagggcaagccggtgagcggcgcctccgacaacctccgtgcctggtggaaggagaaggtccgcttcgaccgcaacggcccggccgccatcgccaagtatcaggccgacaacgccgtcccgggcgccgagaatgagctcgcctcgggcgctgccagccctcattccttgcaggagctgcaggacaccacactcggctcgctgctctcagcactcatgcagcactgcgaccccccacagcggcgctacccgctggagaagggcgttcctccaccgtggtggcctaccggcgacgaggagtggtggccggagcttggcattcccaaggaccagggcccacccccctacaagaagccccatgaccttaagaaggcctggaaggtgagcgtgctcaccgctgtcatcaagcacatgtcaccagacatagagaagatccgtcgcctcgttcgccagtccaagtgcctccaggacaagatgactgccaaggagatctcgacctggctggcggtcgtcaagcaggaagaggagctgtacctgaagatgcaccctggcgcacgcccgccggcatccactggtggcatcgccagtgccatatctttcaacaccacctcaagcgagtacgacgtggacatcgttgatgagtgcaagggggatgaggctggcaaccagaagacagcagtcactgacccaacctccttcaaccttggtgcggctatcctaagtgacaagttcctcatgccgacgccgatgaaggaggagaccgctgacgtcgagttcatccagaagaggaacgcccccgctcctgctgagccagagctaatgctaaacaaccgggtgtacacctgcaacaacgtccagtgcccgcacagtgactacagctatggattccttgaccggaatgcccgcaacagccaccagtacacctgtaagtacaacgatccgatcactcagagcgccgagaacaagcctctgccagcaccgccgcaaccacaagccttccagccggccttcagccaagccaatcaggcagtgaacaatctggacttcagcctgcctatggacgggcagaggtccatcgccgagctgatgaacatgtacgacaccaacttcatgacgagcaagaccatgagcagtagtgacagcgtcaccatcatggagaggccgaacgcgatgccccagaggatccagatggacgagggcttcttcggacagggcaacggagtcttcgacgacgtcaatagcatgatgcagcaacaacagcagcaggcaccacccgtggtgcagcagcagcagcagcagcagttcttcatccgcgacgacacgccattcatgagccagatgggcgacatcaccagcacggcggagttcaggttcggctctggtttcaacatgtctagcaccgccgccgccgctgattacccaggcgcggcgcagaagaacgacgggaccaattggttctactgaagaataaaacttgtagggctcctcgttataagcttcggattcctccatggatctcccaagttgtcaagtcttataggtcttcgttatataggttttgcagtagctgcaagacggctggaacctggaactggtttatacttgtatgtccggccagccataaacctctcttatttgcaaacttaatgttattcctagctttaagttgttagtctcagtctgctgtccatgtatatggctgttaaaatgcttgtgcttgtttctgtactacctgctgtttggtgtctgaatgaagtgttttcttcagtggttctgctcgaaaaaaaaaaaaaaaaaacaaaaggcacatcatcgctgctgctcttcacacaaacaacatgactgacatattcaaatattttgagcgtccacatgtttgttttgattgatgcaatctctccggcgttttttctctctctctttctgttggtgtcaaattgtgaacaaaaaatgttccaacctaacatgtttggaattaccctggttctgtatctgtcgcgccttaattccaacctaaacatggacaggtgctcctgtcatatggtggaaattccgtcttaattccaccgagattgatgttgatgacacccagactacacctgtcctttatagatattttcccacggtaaaacataccctgttgcttcagttaccgtcttgttaaaagagagaccatcactagtgtctttcacatcaagatattcatccttgctttcccttaaggtccggtcaacgcgaagtggcagccctaagggaagttaggccgtccaaactccaaaccgttccaagtgctttgatgctcaagataccggatggtcctttctttgatcgcaagagccctcctttcttttatcgcttgcttggtggcactggcacctgtcatcgtccatgagaccatgacccatcctatcccttagacctcctcacatgctcgccgctggagctggatgctgtggggacgggagctcccctgctgcatcatggagatggaggggacggggatgggccggggtggggtggggcgacgcatcgctcgctggacagcaattgcgggtttttgcttccgtggtggcggatccaagcgtctgggtccgctgccagatttctgcaggcagcctgtattcagagaagccgtttcgaccccacctgcagaatttcctgaccatttcgcccagagctctgttcgttgggatcacgtccatttctgaagaggcatacgggttcttgggatggtctgcggtgaaagatgaagagttagagtctgatctaagctacactactgtgatcacgagtaatgaggccaccaaatctgggccctgccggctccaaatccttatcgagatctacctaatccgtcccctaaagaaacgcttaggtttttattttagtaagctgaaatttgcagcatggtttataattattaaaccaaacagatggctggctgatgtgacttggtacggtcaaattgcccctttgatattcgctagcggcttacggctagctctgttaacctagaacaatggctatagcgctccaactctacaccctacaacttgtttatgtgtttcattgctttttggtccagtttaccaatgatggtgataggtggggatcaagcagaggaataaactagtgctgctctctaactaaccaagtttcttaggcaaaataagccgcttaaaccacgtgcttaggcgcatgattctttaatctttatggactgcacgaacgaaagagcaggtctccatgataaattaaaatagctgaggaagcaaagcaaccctggccccaatgatttgtttggactcaactctcaactggcactaaacaaactggccaaatgggggtcaaaacaagggagagaatcggttcataaaaaaacgtgtgtgcgccatatcagtcgatggactgccggagaacggtctccgcctgggtcgtggtcatggccacgcctcgcctaacaaagcgcacgatcaactgaacccagtcatgctcatgctcatgcccagtcgacgatgtgcgtgatggcacggcgggcctgccacgctggctggacggggtggagctggctggtgaccggtgaactgaaagcgagcaccgtttcccggctaagtgcagcgtacgatggcgagaccaccgcatctggggctgttgagccggccccggtgcacagtgccgaccacgaggacagcgagaggatgggacgtggcgtcagacggcgacagtagatttcttataataacgacagaactcttatccggtgacaattgaagctctatagtggggacgaggaagtgggatggtgcgtggttgggctggccggctgggtgcctgaaagcaacagatcaatggcgacgacgacggtgggaggtggggagaggggccgccggagtggagtagcaccgcggccgggaccggaatgagatgagacctgcgtgccgcgtgcgacgagtgatccacgcgacttgagcgtccacgccgctgcgtccagcctgtttcgattcgacggcgcctcggcgcgatcgggttctggtaaagaggacctggagtggagatagacgacggagatcgcctcatccagtacgtacgcgcggatatgtcatgtcacgcaccgcgcacgccacgcgacacggggccttctcctcgccagatcagatggccgaccacaggtggccagtcctgaatgggatccccgaggcagggaggaccggaggagtcggcgtcggtctggcccacacgcgcgttgcggtggcggtttcccggctcctactgcagctgcaacttgcgagacgcactttgcgtttgggagactgtagccgcgttgcgtgcgtggtgcgcgtcggtgcgtgcggtgcgagcgccgtcgctgacgaacgggacgacatgccgccggcgccgggtgatccaagattcggggcgggggggatggatagcgaggcggacgcgggcgaccgacggacccatcgacctggctttcctggcagggcatattctgcggcgatgcctggatggccaccatgtcgccgcccctgctacaagcctagttttcacggcagctcccgctttgggtgtacgcgtcggcgtctcgcaccaccgaagtgtctcttggaagcccagaaggcctcagcgctgccacgccgcttccgttcatacgacttcgggctactatttttgtgtacggtcagatgagcaaatggtgggtccatatgtagacagagtagactgtggagagtagagacgtg

SEQ ID NO: 5350 - DNA, 1963 bp, Zea mays
gacacgaacccaacccagtcgaaccacctcgccagtgagcgcccccctcccgtcctctttccctgctggccagaactccgaatgaaatcgctgctccaccagctttctttaccttcaggaagcgagccggtagcatcaagctagatcgcggagaagctcctcgtttcccccatcggcgctgctctggcggggagaagcgtcctctcacggcggccgggaagaccaatccgcgccgccagtccctgcggcggcttccgtgaggtggtcttggctcctggggcggcgtgttcgtggtggccggcgagatgagcagccacgcggttggaacaagcaacggcggatccggggatgcggccgccgggggcgcggccaggaggaacaccaggatgcccaaatattccaagttcacacagcaggagctgcccgcttgcaagccgattcttactccaaaatgggttgtctctgttttcttaatcgttggggtcatctttgttcctattggtgttgtttcactgctagctgcaagagatgttgttgagattattgatcggtatgatgaggcatgtgtgccagtcaacatgactgagaacaagcttgcttacatccagaatgagaccatatccaaagagtgcataaggaatcttacggttacaaaggatatgaagcagcctatttttgtgtattatgaacttggtaacttctaccagaaccataggaggtatgtaaagagccgaaacgatgcacagctaagagatgctagtaaagctaaccagacatccgcttgtgaacctgagaagaccacagctaatgggcaaccaattgttccttgcggccttattgcttggagcttgtttaatgatacatataatttcactcgtggtaatgagaacttgacagtggacaagaaagatatctcctggaagagtgatagggagcataaatttggtaaagatgtctatccgagcaacttccagaatggtgcacttaaaggtggagcaacacttaacccaaagatcccgttgagtgagcaagaggacctcattgtttggatgcggaccgcagcacttccgacgttcagaaagttatatggcagactatactttgacctcaaggagaatgacacaataacagtgagattgaataacaactacaatacatatagctttggtggcaagaaaaagctggtcctctccactgcaacctggcttggggggaagaacgattttcttggctttgcataccttatagttggtgggctctgcattttcctggcatttgcattcaccttgctgtacttcgtaaaaccaaggaaactgggagaccacaactacttatcctggaacagacgctaggatgtttcggaacaccaagtgtccgtactactcgaaatgtagcttgtatgaaatgaaatgctctgaaccagaaatgtcgatgggcataagcaagcatggttcaggaaagaacttcatgtatattttttacgaaggggtctaggtggctacgttatttttgtttcttgtgttctttagtgtagcactgaacaggagaataccaattgatctctattagcttgcttcgtggtacaagcactctaaatggttgactgtggtgttgacgctttggctgccgaagaataccaattaatgatgttggttgactgtaatatcctcaagtgggaacagtaccaacttctgtacaaattgattaccgtgtgatgtttgtttctccactaccattatagtacacgggtgccgaaaaaaaaaaaaaaaagtcagaatgcctttctacgtgctataataattaaaaacataatctacaacactagagatgcatatgcgagattcgtttttattgctccacacagatggtagactggaaatcatgactagaaaacttgggattcactgcttcgtcctttattattgtgctcatgttcagattcatttccacttgctcctctact

SEQ ID NO: 5351 - DNA, 1778 bp, Zea mays
acgataggctcggtcagcccaccccagacctttccccttccgtccccggccggcgccaacgccactccagtgagccgagggcggagacggtcacggtgggcagagtgacacgccgcacgcctctccgccccgctccgctccagattgcgcgcacccacccatggcgctcgccgcttcccaccacggcttcctgcccttcgcccccgctgccacgcctaccccgtcacgggggcacctgcgcttccgcgccgcgcgccttctgccccgccccgcccggagaatttgttgccaatctatcaactcagctaatgtgttgggagcttcttcaacgacatctgatgaggcagtcccagtcccagttgtccagatagatcaggactcagaccgtgatgcgaccattgtgcagctaagttttggagatcgtttgggggcgctacttgacacgtgggcgcaaggttgaggaccctgacatgttagaaaggattcggctaaccatcatcaacaaccttctccagtaccatcctgaatcaagtgagaagttagccatgggtgaattttttgggataaaacctcctgagaagaaggcaagtgcaatactgtaaggtgccgtttggttcacatattggtaacgtaatgggtaaccaataagtcaataatgttacatcatgtttgtttaagtccaaccgtaatcatatatcacactaaaaatggataccgtccattcaaacttgttaccgctggtactcgaatgtgaatcattattattactatttatgttacatttcgtgaaccaaacaacacttaaagtgtaatgcattcccattctgtaatttcagatgctgttctgtatcgtgttatctcggtttggccatctttttaactatgatctgtgagttatcactattttaggaaatggaaatttataaacagttaggctacaaatttactttgttatgctattggtttgtgcttcgacctttgatacattattaagcctgaatttgcattctttgatttatgaactggtaggtagatgttgatattgcaacacatatagttgttgaagatgacggaccaaaaagaagcatactttacatagagaccgccgaccggcctggcctacttcttgagataatcaagatcatcgcggacacaaatattgatgtggaatcagctgagattgatactgaaggtttggttgcgaaggacaagtttcatgtaagttacagaggtggaaaactaaacagctccttatctcaggcgctgaccaattgcctgcgttattacctccgaaggcctgagacagatgaagacagctattgattgttgtgtttgtcgaaccttcctatagtgcattagaatcagaaactttggcttcagttccttcgctatgggccccttgtactgctgcaaatggagttttccattgtagctgataaagtgccgacaaggtgcatccatatgtgcataggtggcactgaatcggggctcactggaccagtttgatattgtagtaatatatatacagctgggagcaacataatttaggtttcgatcatcattatcccatttgattcctgttataagggatcacattggaaaaccctcacatgattgatgttgtctgtattctgtaagttggtgcaatccatttgcatgtaaaactcagctgcgtactgtggcgttctatgtagtggaataaataaaagagcattacgaaatcaccgagcagcttgctcctgctttccaatccggtgtgcttattgtttacagtcaaa

SEQ ID NO: 5352 - DNA, 679 bp, Zea mays
gccggccgggctcgggaagccaatcggcacaatactaggtgcgttcgtagcccggccgaatcttccagcccaaagttccatcccattgctcgctctgtccctccgttcacaacctcctccacgaccgaacgagcagagcagacccttccccctcaccagctccgggttccagcggcggcggcggcgaagatgatcataccggtgcgctgcttcacctgcggcaaggtgattgggaacaagtgggacctctacctcgacctcctccaggccgactactcggaaggggatgctctggatgctttggaattgttccgctactgctgcaggcgaatgctcatgacccatgttgacctcattgagaagttgctcaactacaacacactggagaagaccgagacaagttaagtgagcaagcatatcatgctctgaaagcactactgtttcgcagtatcatatatattgtaggcggtatgttgtttcttctctatcaggagaggattgttgtgagtgtgaacttgcttttgctctcgagcattcaaggactgacaagggcatgttgcatctatgttacgatgttggagattttaatcgatataacggctaactaaaaaaaaaaaaaaaaaagcgcccaaaagcccctcgtttgaccttttcaaaaaaaaaaaaaaaaaagcggccc

SEQ ID NO: 5353 - DNA, 2218 bp, Zea mays
  misc_feature (29)..(29): n is a, c, g, or t
gggtcgcccagcgtccgggtttaccgtgnaaacagttgacccatagtccaattatatttcagagaacgaaagcaacatgttttgcttatggccaaacaggtagtggcaagacgtacacaatgcaacctttgcctctgagagctgcacaagacatggttcgtctattgcaccaacctgtctatcggaatcagaattttaagttgtggcttagctattttgaaatatatggtgggaaactatttgatcttctatctgacagaaggcaactactgatgagggaagatggcaagaaacaagtttgcattgttggtctacaggaatttgaggtgtctgatgtacagatcgtaaaggaatatattgaaagaggaaatgcagctagaagcacagggtcaacaggggccaatgaggaatcatcaaggtcacatgctattctacaactggctgtgaagaagcatatcattgtaaaagataccaggagacagagagatcgtgatgctaatgaagctaaaaatacaaaggctgtggggaaaatatcatttattgaccttgctggaagtgagcgtggtgctgatactaccgataatgatagacaaacaaggattgagggagcagagataaataaaagtctgttagctctcaaggaatgcattcgagcacttgataatgatcagatacacattcctttcagaggaagcaagcttactgaggtccttcgtgactcatttgttggtaactctaggacagtgatgatttcttgcatttctccaaacgcaggttcatgtgaacacacactaaatacattgagatacgctgatagggtcaaaagtctttccaagggcggaaatacaagaaaagagcagtccacaggaccaactaccacttctagccgggattctttgtcagctttatcatattcattgcctgctgaagctgaagaaattcctaatcaagttcaagagaagagaccagtcgatacttataggaagggcactgaaaattttatctccaacccttctgtggagtctgaccgaaattcctttagtacgattccaaattattccaatagagggagagaagaaaatggtgcagcatctggtaatgacagggagagctatgatttgaagtccagccaacctgcttacactagtaagccacagttggttcagaattcagcaaacacacaggaggaggagaaagtcacaaaagtctcacctcctcggagaaaggcttatagagaagacaaatctgataggcagagcaactatatgaaaaaggataatggtcctgagacaagtcgggttgggtataagatgcagcaggcaaagcagctgcaacagcaacaaagaccagcatctgcttcagcctcatcaaggcaatctgaaaaggaaagttcttgtgatgatgtagaaattgatgcaattcttgaggaagaggaggccctcattgcagttcacaggaaggagatcgagaatactatggagattgtgcgggaagagatgaaccttttggcagaggttgatcaaccaggcagcctgattgacaactacgtgacacaactgagctttctgctgtcacgcaaggctgcaggtttggtaagcctccaatcacacttggcacggtttcagcaccgcctcaaagagcaagagatccttagccgcaagaaaccttccagatagtatgctcaacaatggctctggattttgcctggaaatcttattgcttggagctcaatcgcagtctattagttggttttctcctgtgcgctccagtaaatgttagacccaagcaaagcagtgatagagaggacacatgggagttgcttgagggtgtggtgatcttgatgttgaggatggtgtggtcctggttgatgtctccactttgtgtttgtcagggttgacaaccagtttggtagtagtcctttttacagtggggctgcttgggtgtttttttttggcagatgtcatgtatggcttgcccactttgcctttttttttcttttccccattttgtacgagaaactggaatgtctggaatgttgtttgcagacaccggtgggtcgatattcaccgagggggtctgtggaaaccgatacattgttgtatactagtcggttgaccgtgcgttacaacggcttacaacaatatccacgtaaactattcataaaaaatttttaagattttttaaaaaaaaaaaaaaaaaaaaaaaaaaaggccccgcc

SEQ ID NO: 5354 - DNA, 1341 bp, Zea mays
gggtcccggtccccccctcggtttttttctttgaatgaacattcaaatcttaaatttgttgataactcatgttgcagagacaagggtttacactttacagcagtgatgcggcccaaatcacaatcacataatcattattagatatttagataacatatcggttatcattatttgacaacctctaggtgcacaaagcaataaattgagatcacgaagcacaacaacaaagatacacaactgatacactacatgatctaactgagtaaacagatggcacaccgaagctacatttggtgatggcttcatttcaactttagaagaaactcgcaacttctaccttggagcaaaatcttccttgaaaagtgtcaccaacttattatgggagcaaaggcatatgacattagacctttgggtcacgcaacagcaaccggtatatctcattgttgtgctctgacatgtactcgtacccaagattgttggcatgactcttgaattcatcatagcgtggtcgcggccctggtacaccaactaatacatttgctccagcttcaccctgtgcacggtaatggaaaaggctgatgttccaacgaggactaaacgcgtccaaaaatttcataagggccccaggcctttccgggaaaatgaaccggtaaaccagttcatcttttatttctgatcttcctccaataaagtatctaaggtggtcctttgccaaatcattgtcagtaaggttaacagtcctcagtttcgcagattccatgcgatccatcattgctccaagctcattgtcagtgtagatgccaacactgtaaagaacaagggcatcttttgcattagaatcatatctgtatttgaattcagtaatattcatcctgccaaccaattctgtgaattttttgaagcttccctgctgctctggcagaaatgtagctaacactgcttcccgttttcggccaacatcagctagctcggttactattctaagtcgatcaaagttcatatttgccccactagttattgcaaccacagtttctcctttcaagttatagtatttgcagtaggcttcagccccagccaatgcaagggcaccagctggttcaaggatacttcttttctcctcaaacatatcctttattgaagcacaaatagcatctcgactgaccatctcaatgccatctactagctctctgcacaggcgaaatgtttcttccccaacagctttgacagctacaccatcagcaaacccaccagcatgctccaacatgaccctcttaccatgacacaaggataatgccattgcatttgcatctgagggttcccctccaattattcccggccgag

SEQ ID NO: 5355 - DNA, 794 bp, Zea mays
  misc_feature (2)..(2): n is a, c, g, or t
gnccgcaaatttgccattgaaatgggggattccaagccattttagggcgtttttgctaaaaccatactgacaagttatccaaggaacacaacttgataacgtaaacaccacacatggagatttccaaacttgtcccatgagcagcgacttcccagggggcgataatgaagaaaaggatgcagcagcaatgaaaagaaaactagccatgcaattctgttgcggaaatagacaactttgtgaatacaaaaggttttgctgttgcaaatacaaactaggaactctctaaagatgtagataacgcaacagcttaatcggtatcgtcaacgaccttggtccccagccctttcaagccctcggcggggatctccgcgacggtgacaagggagtagagctcctccttggcatcctcctcgtcgttcctcttgcgggcgatcctcacacgaaccctccgcggcacgctcctgatcccgctgctccagatgtgcttgttgagcttcacatcaatcctaatgtccgtggtgcccatggccttctgcgcaaacttcctgatctccttgatggcgttgggtgccttcttcttgaatgtgcagccgtggaggcgcttgtggaggttgatggtgtactccctggtgaccacctcctccttcctcgacgctcctcccttcccctgcgacatatctcctctgctccgggtgcgggtgggcggattccgctgggtagtgtggtgcggtgttgtgttccgcggcggcgcgagagcccggccggccccgaggctcccaatcgcccttaggagt

SEQ ID NO: 5356 - DNA, 7741 bp, Zea mays
  misc_feature (1640)..(1640): n is a, c, g, or t
ttttttgtttgcagattgatgtcttataactgcttcagcaacatcttctagagatctctggatactagatgggatctgatagtgatgagcaggagggtcaatattcttcttttcgttagtcgaaatggaactgcgacctgactcaatcgacctcctggttctgaaaacttacattagcagatatgtttccatggatatcgtcaagacctttttgatctcttttgactgcatgctccagctcatcagctcaacccttcgtgtcgagcagggatctctcaccggcgagaccgcttcggttaacaagaccagccacaagttcgagttggaggacactaacatttaacaagaccagccacaagattgagttgttttagttaaattgtttttctactgcgaaattatcttgcatgtagctttggagcaggtaatgcatatccgcaaaaggttaataacaatttattcaacaaaagaaaaaaatgataaaagaactagtagctacttgcctactttcagtgacctctctataattaaaaagattgactgttctacttctgacaactctttcatcaaggtacctgaaattgttgaatttacattctcgtgtgactgttctacttctggcaggttttggttgagaaaatggtggcaggttctgtaataattagtattttttatttatatttttagggtgctgtcagtggaggaacaatgctgccaagagagtagcaactctggaatttgatcgcacccgaaagtcaatgggagttattgtgaaagtggactctgggaagaacttgctgcttgtcaaggtatgcattgtgctggagtttgcattccttgtggttttaggtcgtcagtttcaagtgcacagcaatgacctgcttcttgctgctcatctgtttaagctgtgatgttgtccagcctgtcgcccgccgtgctacccacattcagttgctcgatggatctgttgtgctattggatgatggtgccaaggcactcatattatctacactccgtgagatgtctaccagtgctttgcgctgtttgggttttgcctacaaggatgaattggcagaatttgcaacatatgatggtgaagatcatgcagctcacaagtatctgctcgatccatcatactactcttccatagagagtaatatgatcttttgtggttttgtgggtctaagggatcctccaagagaagaagtccacacagcaattgaagattgcagagctgctggaatacgtgttatggtgataacaggagataacaaagaaacagccgaggccatctgccatgagattggggtttttggccctcatgaagacatcagttcaaaaagcttcacagggaaggaattcatggcactttctgataaaaagaagctcttaagacaacagtgcggccttctcttctccagggcagaaccaaaacataagcaggagatagttagactgctcaaagaagatggtgaagtggttgcaatgactggcgatggggtgaatgatgcaccagctcttaaactggccgatattggagttgcaatgggcattacagggactgaggttgctaaagaagcttcagatatggtacgttttgttagaagtgcctgacgccatgtcctatgaacttgtgtcangttgctaaagaagcttcagatatggtacttgcagatgataacttcagtactatagtcgcagcagttggtgaagggaggtctatttacaacaacatgaaggcttttattaggtctgtttttggataagctatggccaaacttttttgtgcataattgttggttaaattaaaatatgctgagtcatgtgctatatgaactgcagatatatgatctcctcaaacatcggagaagtcgcgtccatattcttgacatcggctttgggtattccagaaggtctcatcccagtgcaacttctatgggtcaatcttgttacggatggccctccagcgacagctttagggttcaacccacctgataaagacatcatgaagaaacctcctcggagaagtgatgactcgttgatcacgccttggatcctgtttcgctatatggtatgttttcaatcacgccttggatcctgtttcgctatatggtatgttttccagttgatcatttgattagttgatgggtttgagattaatatgatacggtggactcttgtttttccagttcaatgaagctgtgtagcaatgtacatgcttttgatcaagtatgtctattaaattgttttacggtgaatagtttgtagtgtaaacctgcaagggttttcatagtgtaactaagttccatggagatcttgagcccccagtagatgaaaacggccacgaatttaccaaagtattcttggatgtgctactaattcagggttgagcttgacttctgataaattaatgatgtgaacaacattggggtttaaacatccaccacttagatatgatttatctgtcgttgttgcctgaaagtgactagtaacaagaagagacataaaatgcagcatcagacttgcatgttcgaataaatatgtcaaattatatgtggagtagatgtatttgctctgatcttgctgatctgcagctgaagtgaaaaggtgtatagctgataagaaatgaagcatgaatgggttatagaaaattatattttatgtaaatctattacatagccttgtggatattggtaccaccttatttttcttgttggcctgttcaaccacatgaaacacgctttgctactttttttttactaaccagagatccatgtccatgcatgtgtaggttattggcctttatgttggggttgcgacagtgggaatcttcatcatctggtacacgcatggcagtttcctgggaattgacctggctagtgatggccatacccttgtgtcgtactcccagctctcaaactgggggcagtgctcctcatgggagggcttcaaggtgtcgccattcactgcaggagcgaggacattcagctttgatgcaaatccatgcgattacttccagggtggcaagattaaagcaacgaccctctctttgtctgtcttggtggcaattgagatgttcaactcactgaatgccctgtcagaggatggcagcctcctgagcatgccgccatgggttaatccatggcttcttctggccatgtccgtttcttttgggctgcatttcttgatcctctacgtgcctttcctggctcaagtgtttgggattgtgcccctcagtttgaacgaatggctcttggtgatagcagtggccttaccagtggtgctgatcgatgaggttctcaaatttgtggggcggtgcctgacagctcgtgcccgaaaacaatcagggaagaggaaggcagagtagatgctagtgatcatcggtattagaatctgtagcgccacgggaatcgatattggatgtgacaccccattgtttttgagttgctaaggtctttcgatcctttctgagtctttttagactgggaatatgacagtccaggacaggcaaggatattctataggactcataatcagatcgcattgaacacactgcattcttttcgttgtaacaaatgctggtgctgtgaacatgctggagatacagcaatggctatctgacgctttttagctatgatggtgcgctatatatgctactactgttctgttgcgaatcttctgacatgttgctcactgctcagtaatatatttgttagagtcgtatgttcagttatgtttgcttgtgagattcctcttgtgcagatgaaatccgcagcatggctattgatcatatactgctgtacacggaggatgcaacattattttagcttcacctgccctcctcgctgttgaccatctttgaaaaaactctcctcatggacataccatcgaggtcccccaagttcgctgccacggtggcctctgtcccgtcgctgacggtagactggttgcgatggaatttggacgtactcctgggaactagctgcgtgttgtctgtgccagagctgtccggcgacgcctcctgcaactgcagcgcgaactcgaggcaccagagcacgtcccctatggcgggccgctccacgccgtactccgcgaggcacttctccgcggtgtcgacgaacttcttgagcgactccggccgtatcgacccagcgatccgctggtcgacgatgctgtcgagctcgccgtttttgagccgctgcgtggcccactctgccaggttgaccatctcccggggcagcgtcgggtcgatgaccggacgggcgcagagcacctccagcaggacgacgccgaaggagtagacgtcggacttgttcgtcagcatctgccgccggaagtactccgggtcgaggtacccgaagctgcccttgacggcggtgctgacgtgcgtcttgtccagctccggcccggtcttggacagcccaaagtcggcgaccttggccatgaagctgtcgtcgaggaggatgttggcggacttgacgtcacggtggatgatcgccttggccgagccggtgtggaggtagtgcaggcccctggcggcgccgatgcacacgtcgagcctctgcttccacgagaggggaggcagctcggagtcgtagaggtggctccggagcgtgcccctggccatgtactcgtacaccaggatcatctcgccgcgctcgtcgcagtagccgatgagcgacaccaggtggcggtgccgcagccgggagagcagctcgatctccgtgcggaactcgttcagcccctgctgcgaccgccggttgccgcgcttcacggccacctgcgtctcgtccctcagcgtgcccttgtacaccttcccgaacccgcccacgccgatcaccatgccctcgtcgaacccgcacgtcgcctcctgcagcgccgcctgggggggcccctacccggcaccggcgctctgcccgagcgtgaccgtgttgttcctggcgcctgcgctgctgctcttgccgaagctgcgcgagtgcgaccgggatcccagcgcgctctccgagaacgcgacccaggtgctcgacggcttcttctctggcttcttccttcgtcgtcgcaacatgaggacaatgagcgcgacagccatcaccacggtgatgacccccgcgatggccgaaccagcgatgattgcggtgacggtcttcttctttgaaccgctctgcgacgagtccgcgccgccgccggtgctcccgaccattctcatgatctcgaggccgttgaggacgccgtctgggtacgcgttgcccagcgtggacgtcccgatgctcacggtgatgttgcccttggcgtccttggcgctgagcacgaagtccttgtataacggcacggccgggacgctgaaagtgtctctggagatctcgtagtccggcagcacattccacccgcctacgtagacgttgaagaccaacccgttcgccgccttgctgacgatgtcgcagaagtgtagccggagcaggtacgccgaccccggcgcggcctggagcttccacgtcatgttaaactgcacgcttatggtgctggcggacaccaggttggtgttgatctccgtcgctgtagcgtagaccatgcctggcgccgtctcgggcgtcgccaagcctggcgtccaccggagcttcgacggcgccacatccctgtgcaccgtgaccgaactgtcgaccaggaaggcttcgtcgggaagccacgtccttcccagcgtgtcgttcctgggcgtgatcttgggagagcccatgttgaccctgttaaccgtctcgagcgcctgcgtggacagccccgcgtagcggcccatggggctcaccgtctgcgccgtgtccgcgaacaggtcgtcggggtgcgacacgacctcgatggcgttgacgaacgccaccttccccgccgccgccggcgcgaacgcgaccgccagcgtgccgccggcgacgttgacggagaactcccggaccgcgggcgtgccgttggcgggcgcgtacccgtcgatgagcagcaggccctgcgcggacacgctgaactcggcgtccgcggcgaggtcgccggacccgtaccggaaggggaagaagtggaggcgcacgaagtggcgcccgggactcttgatcgcgaacgtgtacgaggacggcgccgcgaagacgcgcgcggaccggtacagcgccgcgtcgtcggagccgctggccgccgacgcgctggcctcggagccccggggcgccggcagcacggccgccgcggggaggccgtcgtccccgaggaacgtcctgccgtcgacggtggcgttcgccgccgtgccgcagagcacgaggtagtcgtccgccggggtgaacgcggcggccaccagcgcgggcagcagcagcagcacgacggcgacccgcaggagcgtgtcgaggacggcgcgagccatggacgtggcggaagggagtggctctagaagcagctcatggacctgtccctggaagtggaacagagacgtcgagggttgcagttgcaggcagcatgaatcaaggccccatgggagtcatggtggatggttggttacttagcacaggacaggagctgctgctgtttggcggcgtgctgagagtgaatctgcgaactggcaggacaggggcagcagctagtaggtaccctaagagctgcctacccacaggaacgcggaaccggtgctcggtgattggagatttggttagccatggaggtaatattggggagggaggtggtggagcttttggttagtggggaaagcatatcactgtcattttccgaggatctgagctagaggatggctttagatattttaccaggaccaggagcctttttttttaattctgccattttttcgtggtttacaggtccctcggccgcttgtgcgcttgctcacgtcgacctcagcgaatttcaattcagcagctacaaaatggcaggtgaaaacgaggcatcgagaagagcatacatacacatgccttttcagggaccaaggaattctcgtttctgcggcagaacgacggcaaattattatttctatctctaggcctggctggtggctggtggctggtggtggactggtggtggtgctctgctttcgcagctcgcgaggtggtggtgggaaggaccgcggaagcctccagcggcccgcgtcgtccgccccgcgcaacccgaccagtcgtcaccagagtgcagtgggcatggcaggcggtcgtcgttgtcgtgcgccccaccaccagacgagatcatacgctagctgccggtgcagggtgcacacgtttcaggttcgttagatccgtactagtagatggcaccgatggaattggggattgattggcacactggatcggactcggaaccgtatatccattaaaatttgagggaaatagctagtggctgcaccgcgatactttctctgtccctcacagacacaagtctgtctgatgactgatgtagcatacgcgggcggatggcagacgaggctgctggcgtgtttcgcgtgcgcgcgggggggaggagaaacagaaaccggcgtgtggactggacacacgacgacacaagggccgggaaacatggaggataaagcgcggcggaaggaggcgtgaacgccgccagccaccagtacgcgtcgcgtcgcgtcggtgccgcgagagggacacggcacggggcaccgtctcgccctaggaggccctacgcccacgcgagttgaccggcgatgcatggatggcgaagactgtcggggtgtgcagctggatgcaggggcgcgagcggaacg

SEQ ID NO: 5357 - DNA, 1850 bp, Zea mays
ccgcccggcccccgcggctccagcacagccgccaccttcccccttatactcgccggaggccaaccagtactcgtgccacccctcctcttccttgtgatctccgaatacccatctcagattccaagggccgcgccgtgtaatccccggctctccccacccaccatatatcctagtatccgcgcctcaaatccctcgcgaaacgccccgccgttagcagttgttgtctgccgtgatttgagccgggcggacggattgatcccgggacgaggtgtctcagcttttgatcttgatcctgatcctgggaggcgttcctggtttattggtgggagcgaagaagccatgataccttccgtgaggctctctcctggtcctgcagccttctcaggctccagcctacgctcaaaattaccgtcaattccatccatctccagtctcaaaccctccaaatatgtggtctcctcgctgaaaccactctacctagcaccgctagatggtccgcgcactgccgagcttaagtctcggagacagccacttgagttccgttgttctgcttctgctgctgatgacaaggagtcaaagactcaggtggtgccagttcagtcggaaggcgcacagaggttgaagatctccatctatttcgccacctggtgggcgcttaatgtgatatttaacatttacaacaagaaggttctcaatgcattcccttacccctggctcacctccacactctccctcgcctgcggctctgctatgatgcttttctcatgggccaccggtcttgttgaggcccctaagaccgacctggacttctggaaagttcttttcccggttgctgtggcgcatacaattggccatgttgctgctacagtgagcatgtctaaggtggcagtgtcattcacacacataattaaaagcgcagaacctgcattcagtgttttggtgtcaaggttcttccttggggagacgtttccaattccagtatatctttctcttcttccaatcattggtggttgtgctctagctgctgtcacagagctgaactttaatatggttggatttatgggtgctatgatgtccaaccttgcatttgttttccgcaacatcttctcgaagaggggcatgaaggggaagtccgtcagtggcatgaattactatgcttgcctgtcaataatgtcgctggtcatactgactccatttgctatagctatggaaggtcctcagatgtgggctgctggttggcaaaaggctgttgcagaagttggacccaatgttgtctggtggatcgctgcacagagcgtgttctatcacttatataaccaggtgtcctacatgtctctcgatcagatctctccattgacgtttagcattggcaatacaatgaaacgtatatcagtgattgtttcatctataattatcttccacacgcctgtccgccctgtcaatgcactgggagctgccattgccatccttggcacattcctgtactctcaggcaaaggcgtgaggctaaagctttggccaaaggatcggagccagtagcaggcactggatccagttttgcttgttggagtggcatgtagatataaggttcggttttcgtgagagagagggtaataatggatcagtggctctgctgttccgttcttgtttgttgaccagattgaaatgcacaggccgtgacatgaaccgtcgtcaagtgtacctgaataacaccgtaacgaaattcaccgatgctgtttctttatgggtatgtaatccaaaccggaatcctggtttcaatagaaatagtttctgctatcaaaaaaaaaaaaaaaaaaaaaaaaaaaaaaactcgagggggggcccggtacc

SEQ ID NO: 5358 - DNA, 1343 bp, Zea mays
cattgcattgggtacctccgggccggccgggatccacaagaggagaagaaacaatcaaccagcaacactcttctcttataacatagtacagcgaaggtaactcacatggcaacttccatgggttgtctcgtcttgctctgccttgtttcttctctccttcccagtgccgtccttggccacccatggggtggcttgttcccacagttctatgaccattcgtgccccaaggcgaaggagattgtgcagtccattgtggcacaggctgtggccaaggagaccaggatggcggcatctttagtcagactgcatttccatgactgctttgtcaagggctgcgatgcttcggtgctgttggacaacagcagcagcatagttagtgagaaagggtccaacccgaacaggaactccctcagggggtttgaggtgatcgaccagattaaggctgctcttgaggctgcctgcccaggcacagtctcctgtgccgacattgttgcccttgcggctcgtgattccaccgccctggttggtggaccatactgggacgtgccacttggccggagagactcgctcggtgcaagcatccagggctccaacaatgacatcccagcccccaacaacacactccccactatcatcaccaagttcaagcgccagggcctcaatgttgttgatgttgtcgccctctcaggtggtcacaccattggtatgtctcggtgcactagtttccggcagaggctatacaaccagacaggcaatggcatggctgacagcacactggatgtatcctacgccgcaaagctgaggcagggatgcccccgctctggtggtgacaacaacctcttccccttggacttcatcacccctgccaagtttgacaatttttactacaagaacctcctggccggcaagggccttctaagctctgatgagattctgttaaccaagagcgctgagacagcggccctcgtgaaggcatatgctgctgatgtcaatctcttcttccagcactttgcacagtctatggtgaatatgggaaacatctcgccactgacagggtcacaaggtgagatcaggaagaactgcaggaggctcaacaatgaccactgagggcactgaagtcgcttgatgtgctgaattgttcgtgatgttggtggcgtattttgtttaaataagtaagcatggctgtgattttatcatatgatcgatctttggggttttatttaacacattgtaaaatgtgtatctattaataactcaatgtataagatgtgttcattcttcggttgccaaaaaaaaaaaaaaaaaaacagacaaaaaataaccggacggagccccttgcggcc

SEQ ID NO: 5359 - DNA, 2414 bp, Zea mays
taccatttttacacctgttttggcgaggggggggggcacaggcacagttgtttctgcttccctcattcataaactttatggaaattcgttcgcgccggttcttgagcatgctgagcgtcttacggaggatgtggtttctgtatttccggcagctgatgctttggagcaatacataatggcggggagggcctccgttacgggagatgatggtttggatagcctatgcagacataaactagttccatatcagattgaaagtaaatctggtacattagttttacgctgggtaaatgggcaacttgagagaattgaaacttgggttaaaagggctgctgaccaagaggtttgggaccctatatcccctcaacaacgccatgggaattctattgtagaagtctatagaatcatagaagagactgcagatcaattttttgcatttaaggttcctatgcgagatggagaattaaatagtctatgccgtggtcttgacaaggcattccaagtttatacacagctggttactgcacccctagttgataaagaagatttagctccgcctattcctgttcttactcgatataaaaaggagcttggaatcaaggcttttgtaaaaaaagaggtccaagaagttagaacagttgatgagaggaaagctagcgaaattactcagcttacaatgccaaagctttgtgttcgtcttaacagtctatattacggtatcagccagttgagtaagttggaggacagcattaatgagaggtgggctcggaagaaaagtgaaaacactaacatcagacgaaaaagtgaaaagtcaaagagtgccgtccctaatcagaagaatcaatttgatggcagcagaaaagaaatcaatactgctattgatcgtctctgtgaatttactgggacaaaggttatattctgggacctgcagcagccatttgttgagaatttatacagaaatggtgttgctcaagctcgattggacaccataactgaagtgcttgatttggtccttaatcaactttgtgatgtcattgtggaacaactgagggatcgtgtggttacagggcttctgcaagcatgcctggatggcttccttcgtgtgatactggatggaggttctactcgtgtcttctctccaaatgatgcagctttattggaggaagatcttgaaaccctgaaggaattttttgtttctggtggagatggactgcctcgtggaactgttgaaaacttggtctcgcgtgtacgtcctgtaataaatctgatcaagcaagagacccgcgtgctcattgatgacctacgagaagttactcaaggtggcaagagcaaatttggagcggactccaaaaccctccttagggtcctgtgtcacagaaatgattcagaggcatcacattacgtgaagaagcaattcaagatacccagctcagctccgagcgcctgattgattgcgaacgaaaaaacagatatcgaacaggacactgcagccttgctcgtaacccaagaaacggtgctccaccgcccattttcatgtttgtgtaacagttattgttcatcggtaacactaggactttgggtggacgcggcagtaagcatgtatttacacaaatactaacacactggtcctgtattgattggtactagttttggaccattggagtttccccatttagggctagtttgggaacctcatttcccaaaggatttctgtttttttaaaggagaataaactaatttcttttggaaaaatggggttcccaaactaacccttagattcctgacttttttaaaccaaaactttagtatggcaatgtttggtagccagcagccatccaagcaggctccaagacttggggttcaaatacataaatactcttatctttgacctgcaagccccgaacacttgtctttggaggaaagcgccaagaagtgaatatcctatcctatcactatgcgcaagtgtgtgcaatgatatacaagcatacatacaggcatacaagtataggaaatagtgagcgcggtcaattatatactcctagttttctcgatgaccatagcccatagcatgacccgagacctttacacaattatttattgcaacacatcatcagtccatcatgaagtgattaaagtacgtatggggccacacactcatcttggatgcccatcttcaacctcccgtgcagtcatgcacacaattagcttccccatcccctagtactagtaggagtaggcatgcaatgcaaagtgccgaaaggcagagcgcaaaaactgcacaaggctacaagcaaagcgcacgccctctcatcatctcattcccatggcgacttgtataaacaacaactaccctagtagcaaatagcagtactaaaatcaccacgcatttccatccctcctgtaccgcagaaaag

SEQ ID NO: 5360 - DNA, 2893 bp, Zea mays
ttgggacctcgaggcgccgcgaggccggccgctgttcccgtcgaccggattcggttcggaccgcagctccccacactcgtccgtccgcccgtcgaatggcggctcccaaaccctaagccacagatcccttcccctgcctcagcttcgaacgccctcgcctcgccgccggtctttgtgtactgccgctgtgtccgtcggcgcggatcaagggtccgctccgctgcaccccgcggggagaaaggggcgggcctcggcgtcctccgctcgtcgcccgagtgtctgagtactatcaggtgcaagtccagccgaactgattgcatgacatatgaaatagcgagcgtcgaatgaccttctctatggatatggatttgaacgcatcaccggtgcctgacgatgatgagcagcagccttacaatgaaccagtggaggctgagtatgctcaggaggaacatgttgaatctgctgtcgcaacattgcgccgggaacgtgaagaaagacgcaagagactaaagagagagcagcaggatgatgggtcaaggctacattcccagcagattagggttgattatgctcctcaacccaaaaggcatagtcgcatcaaagaggcacctcagggctggttggactgtcctgcatttggggagccaatagataaaatcataccatctaaagttcctctcgatgaaacattcaatgagtcagtgcctcctgggaagcgatactcctcaaagcaactagttaacaaacaaagaaaagctggtcgtgaaataggtctggtgattgatttgacaaataccaccaggtattattcaccagctgaatggacgaagcaaggtactaagtatgcgaagattgcatgcaaggggagagatgcggtacctgacaatgaatctgttaataagtttgtctatgaggcaatgatattccttgatcgacaaaaacattcaaagaatcctaaatatattctggttcactgtacccatggtcataatcgtaccggtttcatgattattcattaccttatgcgcacacacgtatcttgtgttgctgaggcgataaatatgtttgctcaaaggcggccacctggcatatacaagagggactatattgaagcactatattcattttaccatgaggtccctgagaatatgatgatagcatgccctccaacaccagaatggaagagaccagatgatctcgatttaaatggcgaagctaagcaggatgatgacgacgacaatggtgatccagaaccaccgcgtaatgaatcagaggataaaatcatcaccaacgacgatgtgttaggggacgaagtgccatatgaccagcaagaagctttgcgtgtgctatgttataagttgcttgaaatgccccttataaggggacattcacaatttcctggatcacatccagtttctcttaacagtgaaaatctgcaactacttagacagcgatactactatgctacatggaaagctgacggaacacgatatatgatgcttataatgagagatggttgtttcttgattgatcgaaatttttgctttagaagggttcagatgcgctttccccataagagccttgaaggtctgcatgatatgaccttgattgatggagagatgattatagacacggtaccagattcaggcttgaagagaaggtacttggcatatgatcttatggcacttggtgcagtgtccaaaactaagttgccgttttctgaaaggtggaaaatgctggaagatgaaataatacgaccacgttattatgagaaaaataaatttgagagtggttctaagagcaatccgttgtacaaatatgacatggaattattttcggttagaagaaaagatttttggctgctctcaacagtaaaaaaggttcttaaggtgttcattccatccctttgccatgatgctgatggccttatatttcagggctgggacgatccatatgtaactcgtactcatgaaggtctcctgaagtggaaataccctgagatgaattctgtggactttctgttcgagcttacgaatgataatcgtcaactggttttcctttatgagagaggaaaaaagaaactcatggatggtgcccggatagcatttactgacgatgtagatccatcctctatcgccgggaggattgttgaatgctcctggaataaggaagaacagtgttggtcctgtatgcgtattagatctgataaatctactccaaacgacatcaacacataccggaaggtgatgaggagtatcacagataacattaccgaggaaaagcttctcgaagagattgatgagataagtcttctcccgatgtatgctgataggatgcagcaggctcatacaaagatggcacaacaacagcggcggagattgccaccacagtgctagccagtgctggggcgctctcctaccgccctagccagctgctggcttccgtagctgtgtaattagtagaggtttcagtagccccatatgatgatggctggctgggtctggcctgccaactaattctttgcacctcatttgtgtcttctccctgccctcccacccacctgtataggcgtcgccgcagagtagtttccctgtaaattgtgtactctatgttctcccatattctcccctatggttttatttttcatgggtgtagaatagcgtttaacaagagggtggtcttctaggtacattagtgtacgcgttactatctctcggtgttgcggttgccttgtgctagaataaatatggttaccatctgttgctgatgggtcatgtggttcccccggcggatatcatgtggttgcgtggtatgggttattttcgtcttctgttttgttcgcacctgatccgatccgatcttttgttcaatgaagaagaaaaaaattattggt

SEQ ID NO: 5361 - DNA, 2541 bp, Zea mays
ttgggggcccccgcggccccccggctccttctcagtataaactcatccgcaccacctcccccgggcccgcccgccgctcctgcctcgcctcaccaccattagagcgcgcgcgccaagctcgtggtgaggttttcgagatgaaggttatcgagaagatcctggaggcggcgggggatggccggacggcgttctcgttcgagtacttccctcccaagacggaggagggggtcgagaacctgttcgagcggatggaccgcatggtggcgcacggcccctccttctgcgacatcacctggggcgccgggggatccaccgctgaccttaccctcgaaatcgccaaccgtatgcagaacatggtgtgtgtggaaaccatgatgcacctgacatgtacaaacatgccagtagagaagattgaccatgccttggaaaccatcaaatccaatgggattcaaaatgttttggccctcagaggggatcctccacatgggcaagacaaatttgtgcaagttgaaggcggatttgcttgtgctcttgatttggtgcagcatattagagccaagtacggtgattattttggcataactgtagctggttatccagaggcacaccctgatgcgatacaaggcgagggaggtgctacattggaagcatatagcaatgatcttgcgtacttgaagagaaaggttgatgctggtgctgaccttattgttacacaacttttctatgataccgacatctttctcaagtttgtgaatgactgccgccaaattggtattacttgtcccattgttcctggcataatgccaataaataactacaaaggtttcctgcgcatgactgggttctgcaaaactaagataccttctgagatcactgctgcactagatcctatcaaagacaatgaggaggctgttagacaatatggaatccaccttggaactgagatgtgcaagaaaattcttgctactggcattaagactttgcacctttacacactaaacatggacaagtctgctataggaattttgatgaatcttggattaattgaggagtccaaggtttcaaggccattaccttggaggccagcgactaatgttttccgtgttaaagaggatgttcgacctatattctgggccaacagaccaaagagctatcttaaaaggacattaggttgggatcagtatccccatggacggtggggtgattctcggaacccatcatatggagcacttactgaccaccagttcacaagaccacgaggccgtggtaagaagctccaagaggaatgggctgttccactgaaatctgtggaggacattagtgagcgcttcacaaacttctgtcaagggaaactcacaagcagcccatggtcagaattggacggtcttcaaccagagacaaagattatcgatgaccagttggtgaatattaaccagaagggtttccttacaattaacagccaacctgctgtaaatggagagaaatccgactcgcctactgttggttggggtggtcctggaggctacgtttatcagaaggcctacctcgaattcttctgcgcaaaggagaagttggaccaactaattgagaagatcaaagcattcccttctctcacttacattgctgtgaacaaggatggagaaacattctccaatatttcaccgaacgccgtgaatgctgtcacgtggggtgttttccctggcaaggagattatccagcctacggttgtggatcatgcaagttttatggtttggaaggacgaagcatttgaaatctggactcgggggtggggttgcatgttccctgagggtgattcatcgagggagctactagagaaggttcagaagacctactacctggtcagcctcgttgacaacgactacgtccagggggacctgtttgctgccttcaagatctgattatgctctcatggtctgtattgttgtatggttggacccaacaatattcttgcatccccgactacaggtctgatcgccatgaaagcttctgttcatttgagctcgggggagtccgctagtcttatttttcttgatttctcttggctttctggaaccatacgaatcaataagaaatgagctgtgttcactttccagttcctccgtgcaagtggcgcaacggccaggttctagatgtaaaattcgtcctctaatacagaggttggtattgtatgttagtgtaggatgcgctgctcgcattgcactgttattgtgcttctgtttggtggaaataaagattggtcgaaatctgagggccagattgaaagccaaaaaaaaaaaaaaaaaaaaaaaaaaaaatattattctttgattaattttaaataagaaggagaatctagcccctccggtttctcgctcccaatctagtcctgaatgttcacaagcccccatttgaatttagccgggtaaccccattaattaggaggtctattgaggcgtttttatgggtatgtgaaaagattaggagactctagacgactctatataaaggcagccctcctttgggtcaaagaataattttctg

SEQ ID NO: 5362 - DNA, 2059 bp, Zea mays
cctcgaggccggccgggccggggcttcgcagccagtggctcagcggctgcgcccgtgcctgtcacgtcttgtcctcaatctctctctctctctctctctctctctctctcaatcctcacctctccggctctctttctcctccccagtccccaacggtgaggcccccgccgcgcagcccatcgacgcattgccgctgcaagcgcggacaccgagggctagaagcggcggcggtgccagggttcggcgctcggtcggcaatggcgaggcggcttatgctggcgctccctgtgctcctcttcttattgctcgtcgggcaatgccacggcggcaagattggcgtctgctacggccgcaacgccgacgaccttccggcgccagacaaggtggcgcagctaatccagcagcagtccatcaagtacgtgcgcatctacgacaccaacatcgacgtcatcaaggcattcgccaacaccggcgtcgagctcatggtcggcgtccccaactccgacctcctcgccttcgcgcagtaccagtccaacgtcgacacatggctcaagaacagcatcctcccatactacccggacaccatgatcacctacatcaccgtcggcgccgaggtcaccgagagccccgccaacgtctccgccctcgtcgtgccagccatgcgcaatgtgcacaccgcgctcaagaaggccggcctgcacaagaagatcaccatctccagcacccactcgctcgggatactgtcccggtcgttcccgccgtctgctggggcgttcaacagcagctacgcctacttcttgaagcctatgctccagttccttgtggagaatcaggcaccgttcatggtggatttgtacccctactatgcgtaccagaactcgcggagcaatgtgtccctcaactacgcgctgttctcgccagagtcccaggatgtgattgacccaaacactggactggtttacactaacatgttcgacgcccaggtcgattccatcttctttgcgctcatggctctgaacttcaagactttgaagatcatgatcactgagtcagggtggccaaacaaaggggcggtcaaggagactggagccacaccagacaatgctcagacctacaataccaatttgatacgccatgttgttaatgacagcggcacaccggcgaaaccaggggaagagattgatgtctacatattttcattgttcaatgagaacaggaaacctggcatcgagtcggagaggaactggggactgttttttcctgataagagctctatctacagccttgattggacgggccgaggcaatgtggatgttatgactggagcaaacattacaagtgctaatggtacctggtgtattgcttcaactaatgcatcagaaactgatctgcagaatgccctcaactgggcatgtggtccaggcaacgtagattgttctgccatacagccaagccaaccctgctaccagccggacactttaacttcccatgcttcatatgcattcaatagctactaccagcaaaatggagccaacgttgtggcctgtgactttggaggtgcggggatacgaacgacaaaagatccaagttatgacacttgcgtctatttggctgccggcaataagatgagcacgacgaactcaacatctcttccagctcgcagcgactctggtccagtcccacgcgtcaaatgcttcgccactttgctgcccatgctggccctcgtgatggctgcagttatgctgtgatctatggggaaaaaatgctccagctagcctccttaagacgtgagatgaaaggtgaattgcgtaatgctgctggtaaccatcgaagttctgttttttgccatgagcagtagactagtagtagtctagtagagaggcaccttatgctgtaggaattctctggtcggttaagatgtacatcgtcgcgcggacaatatatatcagctggcattaagaacttgatatcgtattatgctgtgtttcggctctcaaaaaaaaaaaaaaaaaaaaaaagaaaagcaccggcccagggcggcacgctcgcacacacaaaa

SEQ ID NO: 5363 - DNA, 1625 bp, Zea mays
ccggccggacaagagagaagtcggcccgcgcggccggcgcgcagaagctactcccgaagagtcgctctcctgcgtccacgcctcgcttgcggcgactagggcgactgccgccgccgcccttcgcccagctgcccaggtcttcgtcgggcgctttaccgctgaagagcgcccaccataccagattggccaccagaggattgctacatttgggaaggatgagcaaaggccctgttccattcgccaacattgggaagagagcaaaagatctcttgtacaaggactacaactttgatcaaaagttttttttgtcgacatgttctaactctggtttgaatctcacagccactggtgtgaagatcaatgaagacttcattggtgatatacggacacagcataaaagcagcagaaccactgttgatgtcataatcgatagtgattctaaagtgtcaaccacagtcactgttgatgaagcactaactggtttgaagacttcatttgccttcaaggttccagatcacaagtctgggaagcttgatctgcaatatgcccacaatcgtttttcaatgaattcgaccattggtttgacatcaacacctttggttgagctcgctgcaactgtcggcacaagtgaacttgccattggtgctgagttcgggtttgatagtacttcagctgctgttaccaaatacaactcaggggttggatacaacaagtctgatttctctgcttccttgctacttgctgataaaggggagactttgaaggcatcttacgttcatttattcaatccgaccaacggggctacagttgcagctgaggtaacacacaagctgaaaaccaaggagaactatttcacacttgggagctcccatgcacttgatccttcaacattgctaaagacgagattcagcaactcggggaaggtcggtctgctctgtcagcatgagtggaggccaaagtccctcgtgactctttcagctgagtatgatccaaaggtggtaagtgcgccttcaaggatcggcgtggccatatcgctcaagccttgagatatgggtcaagtcaccttctgtaaaacagtacaagcgttacgtactgatactcgtgtccaagaacataaacttttggagcgatgcctagaacaaccctctcccttttagccttgtttttggtaagagccttgggcaaagaagtgttgtcagggagttggacttgttttgtggaatgtttccattaagagccaaccccacaccgatgattgcaaacagaggtttgtattagtgcagaagtttcactctgcgatattttttccccatgttttcctagtcgacgcaaaatgattttggaggtgattgaacacctaacgtcttgagttgacggcagctttaacagctctgattataaaggggccacttgtacccagcaacagaagaatttgctcccaattcgtcgaattggctattctggtggaacattttttgtcaaactcgggggggggcccgggaccctcatgtattcagagcagtctagttttgcttcctcgataaagtatgttgtgttggatatttgtgatgtgaggtgaatgcgcccaggctggagatcagccgatggaggcttatcgagcaggg

SEQ ID NO: 5364 - DNA, 1906 bp, Zea mays
cccacgcgtccgcccgcctgccctgacagcaggagccgcctccagtatcccccgtcaatgcttgcgaggacagaagacacctgacctgatctgaccaggcagatcgagtggcttgccgtcgcgtgcaaccgcaaccgccgctggtattatatagagacccctattacatcggtcgcgccgcgctgtggcgctaatagtcgtcgatcgttccatcgaccggcggccggccagcctagctcttggctcttgctccgatcggatcgagcgccggacaaggcaaggcagccgtacgtacgacgatggcgcagggcagccgcagcgctgccgtgcccgccgcagcgtccttcttcgcccttctcgccgtggcggccccgctgctcctgtgctgcgcgccggccgccgcggagctggccaggctggagcacccgcccaaggacggcggctcgctcagcctgctcgtcgtcggcgactggggccgaaagggcacgttcaaccagtccagggtcgcccatcagatgggcagggttggggagcagctcagcatcgacttcgtcatatccaccggcgacaacttctacgagaacggcctgacgggcacggatgacgaggcgttcgagcagtctttcaccgatatctacacggcgaagagcctgcagaagccgtggtacctggtgctgggaaaccatgactacaggggtgacgcgctcgcgcagctgagcccggtcctgcggaagatcgacagccggttcatttgcatcaaatcattcgtcgtcaacgcagaaatcgtggagttcttcttcgttgacaccaccccgtttcaactcaagtactggactcaccctaaggacgatcactacgactggagaggggtggcgcctcgggaaaactacataaacaatctgctcaaggatttggacggggccatgaagacatcgactgcggcgtggaaggttgccgtgggccaccataccatgaggagtgtcagtgatcatggtgacaccaaggagctactgcagctactgcttccagtcctccaggccaacggcgtcgatttctacatcaacgggcatgaccactgcctggaacacatcagcagcagagacagcccaatccagtacttcacaagcggaggcggttccaaggcatggagaggagtgcagaaccccaccgaagatgacctcaagttcttctacgacgggcaaggcttcatgtccctccagctagaccgtagccaagccaagttcaccttttacgatgtcgacgggaaggcgctgtacagttacacacggtcgagcctgatggaaacaggccaccacctccaagcctccggctacgtcaacgaggaatgaagcaggggcgagtcagcatgcagcgctggagaactgagatcgatgcagttcaagcgtacgtataaattctcgagtgcttgatgtggttcatctgtcaagggcaacaacagttaggtttatatgtgtgcccttgcatctctcgacatctgtcactgccgtccggtactatttggggtcatgccatcgattcgaaaacatgacatggtaggggcagccatgatgtagcaaaaaaaaaaatagtgcaaatattcattatcgaggagttaaaacattaattgtgtggacagcggccgagcataggaccaaaatcagcagggggcaatcaacagattatgtaaaaattacatggttcagtggtgcgacaataaagacacagtatatatatggaaatatatcgtatgcaatcaagcgatgtgctacaccccaaaaaaaaaaaaaaaagactgttgtccttatacctaaaacctagtaccaattttagatctaacgttttttttcacctaaatagaagtactcaataaattttaattggatataccaggtcaagctgatgggcc

SEQ ID NO: 5365 - DNA, 2097 bp, Zea mays
cctgaccaccccctcgcctcgctttccccctcctctcattccattccacccacgccgcctgcctgcccctcgcctcgggggcgaaccaggagaaggggattccggctagggtttcgcggatcgagaagagtcagggaagaagcggggggagagaagagggcggcacctagggtttccgcgggcggctccccccgcatggccgccgccgcttcctccaaggcccccgccacctccgactccgactccgagggcctcgccgagagcctgcgcgcgctgtgcgcgcggatggactccgccgcgttcctgggcttcgtggtggcgcgccgcaaggaggcggacgcgctgcgggccgagatgccgccggcgctcaagctctgcgtggatccggccaagttcgtcatggacgccgtcgccgacgtcttccccgtcgaccgccgcgaggtccggaaccccgccgacctggcctgggcctgcgtgctcatcctcgaggccgccgtgcccgcgctcgccgacacggacccggacatcggccccgcgcgcccgctcgtgccgcgggccgcgcgcgaccgcgcgcggggcatggccagggactggaaggaggccgccgagaagaaggggggcgtcgagggcgccaagccgcccgacgcgcacgccttcctgcagctcgtcgccacgtttgccgtcgccgagagggaggacaggccgctgtaccgcaggattgtcgtcagcttctcctggcgccgccagatgccacgcctcgcgctcaccctcggactcgaggaacaaatggccgatatcattgaggaactgattgctaagaggcagcagcttgatgctgtaaatttcgcttatgaggctgggcttcaggagaagttcccaccagttcctcttttgaagtcctacctggaagactctaagaagacatcaaccgctgcttcagataattcaagcactagcagcggccaatcagggagcaatgtgaacaagaaagaacagtctgcactgcgagctgtcatcaagtgtgttgaggatcgtaaactagaagctgagtttccactggagggtcttcggaagcaacttgaagaactagagaaagccaagaccgagaagaagaaggcagcatcaagcgctaccagtggcggcagcggcggccctgcaaccaagcgcatccgtgcgagcactggaggcccaatgcctcctgccaaggcaggtcgtctcactaacaatgcttgcgtgtcttctctcccagctcccaccacattgacccagtctccctcccacgcgtcatacgccaacacctccccgtcccgcacctcatacgccaatacctccccatcccacgcctcatacgccacagtctccccaacccatgcatcatacgccacaccctcccctccccatgcatcatacgccacagcctccccttacccttacgacaggccggttggacacggcgtgtactgcacccggagcccgccggtgatcagggagccatatgtttacccagctgaggaggtagccaccgtcaacgtcggcattcccatggcctactccaccccgcccatgagctaccctgctgccccctacggcggctatggcaacgggatgccagcttacaccaatggaatggctcctgccttccaccaggcttactaccggtaggttcagtcaggaaacgaagaagtcgctgatgaatgacatgacaacaactgatgatgccaacgactcgaaaccccgctcaatggccctgttttgtagcgactgactacaacggtaggttgggtaccccatcttccatgtccttaccaccgctactactagatgtgttgtctttagctcctcgtctcatcttagtccgctaccgtaattttttttactactactaaggaacctggatgtaaattatgtatggtatcagcgagactgtcgtcgcagccttatgtaattctgttcagaacttttaaaaacgaaaaaaaaaaaaaaaaccagcatgtaatcctgaagtaccggtctaccggatgtaccgtggacttaattagaagtgttttttttatagtttaaaaaaaaaaaaaaaaacgccccccgactagtagactc

SEQ ID NO: 5366 - DNA, 2409 bp, Zea mays
ggggaccggcgagtccaccatcccattcccgtaccacccgcttcttccaactccaactctccaaggcgctgtgctggctgctggcctgctgctaccgactgccgcaactgctccgcatcccggccttgattagcagcagttacgcccgcgcaggacagcggccttgattagcgaagtattcctttgccctacctctctccctaccccattccgacgcggcggccgttgagcacctgcccggaagctatagcttcggccatggccccagatgccggcgaaagcggtggcgaactcccgccgcccgtaaagaagaagtcaccggcggaggaggaggccgagaagaggaggaagaagcttacacctgggagcttaatgaagggcattataaggtctgggagcggtgatgccacccctgcagatggcgatcaggttatacttcattgcactactcggacaattgatggtatcgttgtaaattctacaagaagggagcatggaggtaaaggaatcccactcagatttgttttagggaagagcaagatgatcctaggctttgctgaaggcttcccaacaatgctgaagggtgaaattgctatgttcaaaatgcagcctaaaattcactacgctgaggacgattgtccagttgcaactccagatggctttccgaaggatgatgaacttcaatttgagattgaaatgttggatttctttaaagccaaggttgtggcagatgatttaggggttgtaaagaagatagttgaagaagggaagggatgggaaacacctagagagccatatgaaataacagcacggataactgcaagaacagcagatggaaaagaaattattccgagtaaagaagaggcatatttcttcactattggtaaatctgaggtacctaaagggcttgagatgggcatcggaacaatggcacacaaggaaaaggcaattatttttgtcagtagtacttatttgacgaagtcctcactaatgccacagcttgaaggccttgaagaagttcatttttacattgaactggttcagtttatccaggtgagagacatgcttggtgatggtcgactaataaaacgacgtgtagttgatggaaaaggtgaatttccaatggactgtcctcttcatgatagcctattaagagtgcattataagggcatgctccttgatgaaccaaagtcagttttttatgatacacgtgccgataatgatggtgaaccgttggaattctgttctggagaaggcttggtaccagagggttttgaaatgtgtgttcggctaatgcttcccggtgaaaaatctattgtcacgtgcccaccggattttgcatatgataagttcccaaggccagcaaatgttcctgaaggagctcatgttcagtgggaaattgaactacttggattcgaaatgcccaaggattggactggcttaacttttgaagagatcatggatgaggcggacaaaataaagaacacgggtaacagactgtttaaagaaggaaaattcgaacttgcaaaggcgaaatatgataaggtgcttagggaatataaccacgtgcatcctcatgatgatgaagagggaaaaatctttgctaattcaagaagttccctacatctaaatgtagccttttgctaccagaagatgggcgaatacagaaaatccattgaaacatgcaataaggtgctggacgcaaatcccgtgcatgtgaaagctctttaccgccgaggaacgtccttcatgttacttggggacttcaacgatgcaaggaatgattttgagaagatgattaccattgacaaatcatcagaacaggacgctacagccgcactccttaaacttaagcagaaggaacaggaagccgaaaagaaggcgaggaagcagttcaaaggactctttgacaagaagccaggagagatatccgaagttggtgtagaatcagacggtggaaaggatgcaggtgatgcaagaggcaacggtggtgaggcaacgagtgctgatagaggtgtaaacacaaatgacagtccgaccagcgaatcagagtacgccttcgaggaagagaggcccgggcttcttggcagcttgtggccctctgcgaggatgatcttctcgtctcttggcatgaacaggtgcgcgatactctgaggtgtccagtttgtactgaggagacatccaaaatcatggcagtgaagaggaactgccccgaggtttctggtatttatttattagagtaagtttggatgtatggaaaatgaaccgtgtgcaagatgtaaatgagaaacaatatgcagggaattttaatagctatctaggattcattatcttccacggcataaaataatttcccaggtttcttctaaaaaaaaaaaaaaaaaagccgccagagtcttctagaacggc

SEQ ID NO: 5367 - DNA, 1830 bp, Zea mays
gcgttcgctactatatacaagcatattcaggggggggtgtgaactaaaaagaataagaaatggagtcaaataatatatatgtaattagagtaacgggaccggtcatcccaggtcccagtccaccggtatcctcacgcagccacgctaaattcgtctccacctcctccctcgtgacatcgtctcgcacggtcgctcccacctttccgcccgccgaaaccctagcccgccccgcctcgccgacggcgatgggcgctgcatgatcggtgcgtccccttggaaccgcctgccttctggcatcgccaagcccgctgccgcggctgccgtcgtcgtagcggcgctcgcgtcctccttcctcgccctcccgcgtcctcgcgccgccccgcccccagcgggatccgggcccctcatgtcgaaggcaaaggtctacaccgacgtcaacgttctgcgtcccaaggagtactgggactacgaggcgctcaccgtccaatggggtgagcaggatgactatgaagttgtcagaaaagttggaagaggtaaatatagtgaggtctttgaaggcatcaatgttaacaattatgagaaatgcatcattaagatccttaagcctgtcaagaaaaagaagatcaaaagggagatcaaaatacttcagaatctctgtggaggtccaaacattgtgaagttgcttgatattgtcagagatcagcattcaaagactcccagtttgatatttgaattcgtcaacaacacagacttcaaagtcttgtaccccacattgacggattatgacatccgctactacatatatgagctactcaaggctctagattactgccattctcaaggcatcatgcatcgagatgtcaagccccataatgtcatgatagatcacgagcttcgcaaacttcggttgatagactggggcttagctgagttttaccatccaggcaaggaatataatgtccgcgttgcatcgaggtatttcaagggacctgaactccttgttgatttacaagactatgattattctttggacatgtggagtcttggttgcatgtttgctggaatgatatttcgcaaggaaccattcttttatggccatgacaaccatgaccaacttgtgaagattgcaaaggtccttggaacagatgggttgaatgcttatttgaacaagtatcacattgagctggaccctcaacttgaagctcttgttggaaggcatagtagaaaaccctggtcaaagttcatgaatgctgataaccaacatctagtatcacctgaggccatagattttctcgataagctcctgcgctatgatcaccaagataggctcactgcacgtgaagctatggcacatccctacttcctccaagtcagagctgtggagaacagtagaacgagaccacaataatcgttgtctacaccctcgaaatgaagttgttgctaatttctggaacatcataggctaaaaccgttcaataagcatctcgctccaggaatctgggccatgactccgtggcagtgaatcagatagtatgggtcgcatcatgtgggcaaccttggcagatgtttttattgttatctttaatcttgggactactgtagctttaaacctacaggctgtgcttgaatgacatgatattcatatcatatcgtctcctgtggtgggatatgaaattgtatgttatctttaaacataaacatactggttgtattatggtgtgctattatgtatgtatgattcttatttattctgtgtgatattgtgatgaaatactcatggacctcagagatgaaatatgagtttcccaaaaaaaaaaaaaaaaagcggcc

SEQ ID NO: 5368 - DNA, 2061 bp, Zea mays
gctagttactaataatacatatatcatatatatataccattaagcaaagcttccacatgctgccgcccgccgcttttttttttttttttctagcagcaagagcatgcacttgttataacggaagggtatttagtcaagcataaagctacctctattacaaccactggtgacgacagctaggtgtactctacgataacatgtcaaagacagaaggcagactgaggagcagactgaggagtcagccttctgtttctgaagcacaagtctattgggattataaacacataggattaaacccctctccaggttcttttcctggattgcggacgactcagtccgtcagtccagcgtcatcggttgggcgatgcaacagcggaagcgagccttacggacagtggtcagaacctccacctccacctgctccagcatcctcacaatctcagcgaatgggggacggacttcagggtttgtgtcccagcacatggtcatgatctccgcaagggcagggaggcagtcgtggggtatggctggtcgcacgcccttgttaaccacagcaaatgcagcttgcactgcgctcatgtttgcaaaggggacattcccagtcactaactcccacaggacaatggcaaaactgtagacatcaactttctggttgtatggcctatgctggatcatttcaggagccatccagcggtatgttccagtttcaggtgtcatcccctcagtcttgacttcaatcctagccactccaaagtcagcaatcttaatggacttatcaccagaaatcaggaggttgtccgacttaagatctctatgaatgaacccaaggccatggacataggccatgccacgtgcaacatccaatgcctgcttgactgccaacttcagcgggacagacctgttctgcctcttgctcaagaaattcttgagagatccacccttcgcatactccgtcacaatacaccaaaccaatggcttcctgcacgcaccaatgaacttgacaatattcgggtgcctcagtgttgcaagcatcataacttcttggacaaactgctgctctaacagttgagctttctcagggtcagcctcaggtcgctccaaaagcttaatagcaacatccatcccattgtatgttcccctgtagagcttcccaaaggcaccttgtgcaaagggcattcccaagtggagcttccccagatcaatagtccactcctcataatccttgagtgtctcagttgggaacttattgtccatcagagcatgtgccagcgcatcctcactcaaggcgtgggacacccggccagggcggaagatgctgtgcccaaccgagtagcttcccacaatggcaggccccttgagaccaggatgaccaagcatgccagtgcgggagtcactgttagagccaacgctgctgttgttgtccacagacatggcgatggaccccccatgcatgctggtctgcatgctgttgaggctgtcgaccgacatgttggtgccctcccctagcttctggtagaaggccatgtcacagaagttcccaccaaagtccacaccaccatcatggccacccacggcgccgatgaagtcagggaagttgatgccttgcgccatcactcgacaaccgaaatgttagcctctgcagtaacttggctcttccccccggtcccccccaacagagctcccaaaagtctggcgattgattaccctttcgaaggctggccgggaacacgccgccgctgccgatgccagtcgatggaggaagatgaggtcggagccgcgcgcggaggtaccagcgatccggggagcgcgatcgagggagggcggacggacggtgggagcaggcggtgtgtgatgtgatgcggttgcggtgtggcgtcggaacggcgcggaccccctcgtctctggaccgaggaggacggggcgacgggggcggcgaccggtgggtgtgggggaggaagaggaaggcgaggggaacgcgagagaggaaaagatcaacaaaggcgagggcgaggcgagacagaagaaagcgagagtcccggccggcctcgaggggccccatgg

SEQ ID NO: 5369 - DNA, 2701 bp, Zea mays
gtcgttctcgtctttcggtactcgcgcgcgccagctcacttctctacttcccttcccagatctacctccattcttccctcaaaatcacagatctctctcggccccgtgcccagcgctccgaaaccctagcgccgccgcgggtgccaggccgcgagcgtcgccatgggcatcgtgtttacgcggctcttctcgtcggtcttcggtaaccgcgaggctcgcatcctcgtcctcggcctggacaatgctggcaagaccaccatactctatagactgcaaatgggagaggtcgtctccacgatcccgacaattggattcaacgttgagacggtgcagtacaacaacatcaagttccaagtatgggatcttggtggtcaaacaagcatcaggtaccggctctttatcatgatagtaaattcctgactgtcatttctgaagtaaataatactattgcatttatttaatcaccgatgaaaagcagtgcaatagaggtactctactactacctttttgtttattataagtaattggtggagagtggagacagtaccttgttattaccctgccacttcagtttccacaagctaaattatgaggctgtaagaatggacatgtttaatgaagataagaaaattttatttttttcccataacaggatgagcctgaatttaattgataatgcaacgaattagaaaggttcctcattgcagtgtttaatgtctcccaaaccatgtaaagatcaatctttttctaagacatgctgtaaagattattagatcatgctgactaatctagttgtttttgacatggaagcctggtctatggctttactgctatatgtacatcgtgcctgtcttggatgtaatgcttttaggttgatctttgccaccatggagataaaaaagaacttgaccatgagagagatatgcccctcgtgttcccttaagtaatagctacacaaagattggaagaattagacagctttatgttaataagaaaaggcacccaatttcacctaaatgagtactcgttggtggcctggacttaagtccacatcctcaaccagttgatcaaggctgtcacactatgatcccaagtgttatggtttggccttggatcatttcataatttggtgtcacaaccgcacaacatatatgacattcatgtatagtgtagtggatacacaatgaaaaatagttgtgtagttgaaggctagtaattccagtagaactagtttatagagtcgaaaatgtgagcaaggtatggtagtctagtctctatgacgctgtgtctagattcatttgtaacattatcctcagttgccaataatttgtttctatattcctttccatgtgagctccgctttaggggggaaacttggatagtgtttggttctggtgctggcaacatgacttatttacggagggtaatagatcctgttgcatgctgtttgagcgtaacgctcctgccactgtgctatctgataccaccattgtctttgctagccatgacagcatgtctccgtcaggttccctcacgtggccgttggatcaggatagcgtgtcgaaaacaaaatgacaggcggagccccactctgctttgttgtccagtagctactgtgttaaagttaccaatatctaaccaaacggatcaagtaattgcttaccatatttacgttagcgctgtttatccattccccttacatttgtgtttctttatcctaaccaaacactaccttaagggcatttcaagtattctactagttgtaagtattttttttctttttatacttgcataagtgttggaatggcccgtgatgacatatagcatgattttttcaatcctgagactttttgggtttcttagagaaaactaacatgtcaacttgtttgaattttcattgccacttctgtgcttttgaacatcagaactataaccattacttttgcatgatgcattttttcatgaactaatacatttaagtttccaagtatgggatcttggtggtcaaacaagcatcaggccatactggcggtgctactttccaaacacccaggctatcatatatgttgttgattcaagcgatacagataggcttgtaacagcaaaagaagaattccatgccatccttgaggaggatgaacttaaaggtgcagttgtccttgtgtatgcaaataagcaggatcttccaggtgcactcgatgatgctgccattacagagtcattagaactacacaaaattaagagccgccaatgggcgattttcaaaacatctgcaataaagggagaggggctcttcgaaggtttggactggctcagtaacacgctcaaatctggaagcagctaaggagcctccgcctcgtcatgaatcatttgctggaggctaaagaatagccgatgcttgcaagtcagcgcgcaaatcccattctctttgttttaactccagaagttctacaccgccatcaattatctgtaaagtgcgtgttaaattttttggatactacattagatgtacccccaggttgagatcaagaataggtctgtggaaaatgacgagcaaactgtgctactgtctttacccgtaaatctcatggatcatgacaagtttttttttgtaccccaatatgattaaacttactccacatttctatgttttcgtatcagtgatcattacagaaactgctcttaaaaaaaaaaaaaaaaa

SEQ ID NO: 5370 - DNA, 1796 bp, Zea mays
actccatagggccattgggtacctcgaggccggccgggaccgagagtggcagtggagtagtggtaggaaaagctcgtcgccgagtcgccgtacgggggctcggctcgggtgagcgagcggcggccggcgggtactgaggcctgagggcgaggcgatgggccgcctccgtgacgggcgagccttcctccaccgcgcgcttgtcctctcgtcgctgctccttctcgcctccggcgaaatcttcttcgaggaacggttcgatgatgggtgggatagccgctgggtgaaatctgattggaagaagagccaaggacaagctggaaccttccgacacacagcgggaacctactctggagaccctgacgataaaggtatacaaacaactggggatgccaaacattttgctatatcagcaaaattcccacaatttagtaacaaggaccggacattggtgatccagtactctctaaagattgagcaagatattgaatgcggtggtgcttacatcaaacttatgtctggttatctcaaccagaagaaatttggtggcgacactccttacagcttcatgtttgggcctgatatatgtggggatcagaaaaagaagctccatctcatactttcataccaagggcaaaactaccctatcaagaaagaactaaaatgtgaaacagacaagttgacacatttttacacatttattcttagacctgatgccacttatagcatccttatcgataaccgggagagagaattcgggagcatgtacactgactgggatatccttcctcctcgtaagatcaaagatgttaatgcaaaaaagccaaaagactgggatgacagggaatatattgaagatcctgatcaagttaagccagagggatatgattcaattcctaaagagatacctgatcccaaggacaaaaagcctgagtcatgggatgacgatgacgatggtacatggaagcctagaatgatacctaatccagaatacaagggaccatggaagcggaagaaaattaagaatcctaactacaaaggaaaatggaagaccccatggattgtcaatccagagtttgaggatgacccagacctatatgttctgaaacctttgcagtatgtggggattgaagtatggcaggtcaaagctggttcagtttttgacaacattttgatttgcgatgacccagactatgcaagacatgttgtagatgaaacttttgctgcaaataaggaggctgaaaaggaggcctttgaaggagctgaaagaaagaggaaggctagagaagaagaggaagcacggagggcacgggaggaaggggagagacgaaggcgggagagggatagggaccgcggcagggaccgatacaaggatagatataagcgtcataggcactacgactaccatgacgagctatagatcatgtattcttttgaaatctgcacgatattggatgtctgtctacggagagcgcacgtgcaaaacttgtatgttgtactcacggatgaagctgaacctgtgattttggcgatgggtagagattggccatcgcgtctgtaactaaatttccacgttgcgatgcaatatgagctgtagtactgtcctcgcactactatttaccgtttgtgctgcatatgtgatataaaccttcaagaaacacacacacgaagggtctgaatgagcacggcctttgttgtttgcttcttataaaaaagaactgttttatctgtgtatacttgccctactttttgctatttccaagcagctggacagaaactgactactgtaccagaaccag

SEQ ID NO: 5371 - DNA, 1871 bp, Zea mays
cggccgggggcaactggtacctttgggggaggcgaggaaggacacgaggtcggcgcgttcgtgcgtgcccttctcactgcacgccggtgagaattgagatcccagcaccgagacgacgacacaagtctcacctccatcctcctttactcctcatcccagatccctctctccgaaccccgccgcccgccgcagatccgagggtcatcggcagccatgatctcgtccagcaagctcaagtccgtcgacttctacaggaaaatacctagggatttgaccgaggcatcactatctggcgctggattatccattgtagcagcattagcaatggtttttttgtttggaatggagttgagcagttacttagcagtcaatactaccacatctgtgatcgttgataggagttcagatggggagtttttacggatagatttcaatatgagctttcctgcgctttcatgtgaatttgcatcagttgatgttagtgacgtgctgggaacaaacagattgaacataacgaaaactgttcgaaagtattcaattgatcggaatttagtaccaactggatcagaattccaccctgggcctatccccattctcaataagcatggagatgatgtcgaagaggatcacgtggatggtgcattttcattgtcatctcgcaattttgatagcttttcacaccaatatcctgttttggttgtcaacttctatgctccctggtgttactggagcaatcgactgaaaccttcatgggagaagacagcaaaaataatgagggagagatatgaccctgaaatggatggtagaatccttctaggcaaggttgactgcactgaggaagttgaattgtgtaggagaaaccacatacaaggatacccatccattcgtgttttccgtaaagggtctgatataaaggagaatcagggtcaccatgatcatgaatcatactatggggaacgtgatactgagagtttagtcgcggcaatggaaacatatgttgcaaacatcccaaaagaggctcatgctttggaagacaaatccaataagactgttgatcctgcaaagcgccctgctccaatggccagtgggtgcagaatagaaggctttgtgcgtgtcaaaagggttccagggagtgttgttatatcagctcgatctggatctcactcgtttgatccatcccagataaatgtttcgcactatgtgacacagttctcatttggcaaaagactttccccaaggatgttgcatgaattcataagacttactccctatcttcgtggataccatgatagactagctggccagtcttatactgttaagcatggtgaggttaacgccaatgttactattgagcactacctacaagttgtaaagactgagcttgtaacacagaggtcctcaaaggaactgaaagtgcttgaggaatacgaatacacagcacacagcagcttggtgcacagcttctatgttcctgttgtgaaattccattttgagccttctcccatgcaggtcttggtaactgaagtcccgaaatccttctcccatttcatcacaaatgtctgcgctatcatcggtggggtcttcacggttgctggaatactggattccatctttcacaacacactcaggatggtgaagaagattgagctaggaaagaacatttaaatttcgacgccgctgcaagtttaggcggatgcactaggtagccattgttttgttataactaggtaatgactcatgaaaatcggtatatgaaagatggcgtgctgaattgacagttgaaattcggggtggtcatgaactcatcatataataactagggatctcactgtttcgctaaaccactcacaataagacagtgaattgctgct

SEQ ID NO: 5372 - DNA, 1925 bp, Zea mays
gcacgacaccgccgccccgtgcggcgcgtgaaaggaacggggccgccggccggactcttctgacttggcaaccgccgcgcagcgcgacgagcgccacctgcttgctgccgcgtgcctgcgtgcgtgtgcgtccaccactgaccccgcgcccgcccgccgcccctgcccctccactccacttgctcactcgtcggctcgtcgcggcccgcttcccccccggccaagggatggacgcgcttcgcctacggccgtccctcctccccgtgcggcccggcgcggcccgcccgcgagatcattttctaccaccatgttgttccatacaacgaaatggtgaaggacgaatttgcttttctagccaaaggacccaaggtcctaccttgcatcaccatcagaaattcttcgaatggaaatcctcctattgtaggatatcacatcggtcattaaatacttctgttaatgcttcggggcaacagctgcagtctgaacctgaaacacatgattctacaaccatctggagggcaatatcatcttctctagatgcattttacagattttcccggccacatactgtcataggaacagcattaagcatagtctcagtttcccttctagctgtccagagcttgtctgatatatcacctttgttcctcactggtttgctggaggcagtggtagctgcccttttcatgaatatctatattgttggactgaaccagttattcgacattgagatagacaaggttaacaagccaactcttccattggcatctggggaatacacccctgcaactggggttgcaatagtttcggtctttgccgctatgagctttggccttggatgggctgttggatcacaacctctgttttgggctcttttcataagctttgttcttgggactgcatattcaatcaatctgccgtaccttcgatggaagagatttgctgttgttgcagcactgtgcatattagcagttcgtgcagtgattgttcagctggccttttttctccacattcagacttttgttttcaggagaccggcagtgttttctaggccattattatttgcaactggatttatgacgttcttctctgttgtaatagcactattcaaggatatacctgacatcgaaggggaccgcatattcgggatccgatccttcagcgtccggttagggcaaaagaaggtcttttggatctgcgttggcttgcttgagatggcctacagcgttgcgatactgatgggagctacctcttcctgtttgtggagcaaaacagcaaccatcgctggccattccatacttgccgcgatcctatggagctgcgcgcgatcggtggacttgacgagcaaagccgcaataacgtccttctacatgttcatctggaagctgttctacgcggagtacctgctcatccctctggtgcggtgagcgcgaggcgaggtggtggcagacggatcggcgtcggcggggcggcaaacaactccacgggagaacttgagtgccggaagtaaactcccgtttgaaagttgaagcgtgcaccaccggcaccgggcagagagagacacggtggctggatggatacggatggcccccccaataaattcccccgtgcatggtaccccacgctgcttgatgatatcccatgtgtccgggtgaccggacctgatcgtctctagagagattggttgcataacgtccaacatagcccgtaggtattgctaccactgctagtatgatactccttcctagtccttgccagcaccagtgacccaaacttggtcggctgagctcagcgctcagcagctttacgtgcatctgcgccttgacttgtgcagtgggcgtcgctagcatgaatgatgtatggtgcgtcacggcctgacggttcgtcagtctgggccgtgttttgtgtcaaaaaaaaaaaaaaaa

SEQ ID NO: 5373 - DNA, 1358 bp, Zea mays
tactctcgagtttttttttttttttaattagtgaaaagttcgattatgcatagccaataaactaattccctggcgtcgccagctgtttagttttatagagtatcaaacactacaacgaccaattgggacacgactaatctggaaaaaaactatcatcggagttcagttcttttactagtgtacactgcaaataacagaagttaaaaacaaacaattgtacacgttttatgtagctaaactctctaacaaaagccctggttgcgttgctgtaacttttatcttccgataaccatctaaaactttgctccaggagaagtggaagacggatgagatttactgacgtgattcaacaatgcttcagagctcagttttgcttttgctggatttggcaggcttctttgcccctttccaccatttctttaccataccagacaccttgtttacatgccctttcaacttcttgctggtatccttgaactgctgcacgacttgctgtttcaaatctttcttttgagagcccttgtttttcagagctttccccaagttctttgggaagttgtcatcctcatcttcatcatcctcctcgtcgtcgtcttcagtaccaaagttatttttcatcagatcgtccctggagtacattttcatgcttggggctcccggcataccctccattgatctcaatatcttttccatctcagcatcctttgatggcttccttgcaaatggttccccagggacacgatcttttggaactggcggtgggtccttggcacatgctttcgaaagatctttgcagagaaatttcataagctgatcgaccgaggggttatttttgtatacaaactcagcaacatcggtatcagcatatcctatcacctcctgacatgcacgctcaatggtcttgcattctgcattgcaatgcccttcctcatcttgctcaacaagctcgagcttgtcgcctttctcgacgatatcgatccggagcatccaatccgcctcctgcttcttcaggttgcagacattctccgcgacctcgatgatctcgatctccggtaccttcttggagggcgggagcgcctggtgcttcttggcgacctgcgcggagatctcgcgcgcgatccgctcgcacacctggcaccggatgtaggggatgtcctcccgcctcgcggccgtcgccggcttcttctgccccgccgcaacctccgccgtatgcaggagcacggtcgcgagcgcgacggcgacgagcaaggcgacggcgcgacgggccattctctccccacccctcactggttgggctcgtcgcagctgctctgttcggttcttgcagcagccgaactaaaacggtcagggctggtttt

SEQ ID NO: 5374 - DNA, 1183 bp, Zea mays
gcacgagggtgaacgtggtgagcctccgcccagaatgcaaccctactagtgctagctttcggccgcgaaaaacgtccccacccccacgtctcaactttatagccgccccctccccaccgccgcggccgccacgcgcagcagcaacccggtagcagcctagcaggagcgcagccagcaagctcagccccccaggccccagccctactgccaccgcgccgaacgacatggccgagccggcggagcaccgtccagctgaggaggaggaggccgcggcggccggcgaggatgaggacaccggcgcccaggtcgcgcccatcgtgaagctggaggaggtcgccgttaccaccggagaggaggacgaggacgcgctcctggacatgaaggcgaagctctaccggttcgacaaggaggggaaccagtggaaagagcgcggcacaggcactgtgaagctgctcaagcacaaagacaccgccaaggtccgcctcgtcatgcgtcaggcgaagacgcttaagatctgcgccaaccatctcgtggtggcgacgactaagatgcaggagcacgcggggagcgacaagtcgtgcgtgtggcacgcgctggacttcgccgacggcgagctcaaagaggagatgtttgctatccgttttggatctgtcgagaattgcaagaagttcaaggacactgttgaagagatagctgaacagcaaggaaagagcgaggagaaagaaaatgatgaagtctccactgccgcttctgatttggcacagaagttaacagtggcagagcccagcaaggaggaaaatgcagagaaagaggaggctcctgcatccgatgataagaaggatgataaagagtgaaggttgaaggcaaacaagggtcaaatggatgccattccattcatttcgtttccaaggttcagcttccccgcaaattttcattgtgttttctccgagatgaatgtttgtgttcggtgaaatcagagtcgtcagtcatctacatagcttttcttggttgatagactgttattttaagtcgcatgtttatctgggatggctggggtcagcatgtttgtacaattatttggagttgcttttggaatggacgcggtttgatgagttgcctacagaaaaaaaaaaaaaaaagctccacttttctggttcaacccaccgcaatagaatgggatgct

SEQ ID NO: 5375 - DNA, 1114 bp, Zea mays
  misc_feature (1075)..(1079): n is a, c, g, or t
  misc_feature (1084)..(1088): n is a, c, g, or t
ttttttttttttttttgcaaccaattcttcttgtggtatttggataaacattactgtacatctgcacaaaagggtaattaatagtagccatattatacactgctcttgtatatgccttgctatacactttaaagataaagtgatagcaaaataataagcaatcgaccagtctttgcgactgttcttaagtttctctcaagtcttattgtgccttctccatctggaactgtatgagattctccttccacaaactgttctccaagtacctttcatagaatgttacctcaccttccaatttcgctgctagggccaccatgcttcgtgttccatatcgtgcctgttcctttgcagtgtcaatgaatattgagcttagcttgtactcccactcagggtcgtcgccggtgtcaggcaccatagatctatcaggtctggcagtatccatcatcaactcttctaccatttgttttaaagaggcttctgcatcatcgtgtattgccaaatatcttttgaaaccctgtcctaagcgcattgcctttggccaaggggaattaattgcagcattcgaaagcacatgaagcccaggagcaactgtttgaatcacaggatcgcctccgggtctattagagatgtaaaccatggttcctgagttcacatcagccaatataaggttaaagccattgtactgatctgcttcctttgcaatttctgtggcatactccaatggacaaaggctgccctgtagaaacctgaccgggagctgtcctctggtcttggccccgatcagagagctgggttcccgcacgttggtcaggaaggcgagcttaccatccctcgtgcaccccatccacgttcccccgccgagctcgtccctgcctccaaggatttccttggcttcctcccccgccgcccaccactgcgccggctgcgtcggcctggagtgatactcgtcgcgattgaacagcagaagcaggcggtgcgtcgggtggcagtgccacgcccatgccgcgatgcacatagccgaccagcggtgatggaggtggaaacgtcctcccgcccgccttcgggttcccctttnnnnnaaaannnnncccggccggcctcgagggtcccaatg

SEQ ID NO: 5376 - DNA, 1707 bp, Zea mays
tctatattttataaaactatatacatattttaaaacatgggttattgcgttcttgctcccactttgattccaattatgattttgcccatgcttttcaaactttgtgatattttgcccctacttttctcagatgaagctgaaaattacccctgttttgtgaatttaccccactttcctccgcaaagtaagggtaactttcagctttaactaagaaaagtagaagcaaaattataaagtttgaaaagtagaggcaaaatcataattgggaatcaaagtgtgggggcatgcaagaacacgatagtccctttaaaacaatgctgagatatataaatatttgatttaggataaatgtaacacacgatacgcggagggagggggtaataaaaactccaaacatgcaacggggacgagacgtgccaggtgtgcggttctgtggccgtggaatgttaaccgtgaaatatggcaagcatctcgcgcctttgcgtttgggcaagagaattggaatggaatccaatacgcggccacctgatatgaacgaagctccttgaagcatattgcatgaggtcgggagtgatacgtgtgcggattcgccgcaccacgaaaggcattataaattcggggcagccagcctccctcgttgcagcggccgcggcggcggccagcggaggagggcacaggcagcagctaacatccctcactctcggtacctgacctgaccacgagagcaacatgggcggaggacacgacatgcacgggcagcactacggccacaacggcggcgtgaagggcttcgtgtccaacctcgtccacggcggcggcggccatggccatggaagcggctacggccatggccatggaaacggctacggccatgggaatggcggctacggcggcggccacgggtaccctcctcccgccgccgccggcgcgtaccctcatccgcacggcgcgtaccctcacccgcacggcggccacgggtacccttctcccgccacctaccccgcgcactcggcgcactacgggcacacgggcgtcgtaccacaccagccacatcatgccgtttgttatttgacgtttccgcggccggccgcgcgcggtttgttatcctggctgcgttgcgttgcccggggcacacggggtcgtaccacaccagccacaacagctacggcggcggcggcggccaccacggcatctacggcggcggcaagcacggcgcgttcggcggcggcaaccgcaagagcggcggcggcaagttcaacaagtggaagtgaagcgaccgaaacgaatcaaaacaacaccctcagtctcgcttcgcacacgtgcacccgcacacgaatcctagtgctacataataaagtgcaagcaggcaggaggcgtacgtgtgcgagtgagtgctgctgctgcggcgaccgtgtgaccgtagtcgttatttgtgtgtacggaataaagtggtgagcgctgagacgtgcgtgtcagcctagtaataactaaaataatggccgtgttcacgtaacgtgctcgccgtatgtaccatcgtgtgtaccggccgtacgtatgtacaagccgagtgcaataatacagtactatgtgtattattaaatcccatgctctgcatacagaaaaggacacatgctgctgctttagtaatgctgctagaaaattggcttgattatatcactgacagctctagctgttggatcttgactg

SEQ ID NO: 5377 - DNA, 2412 bp, Zea mays
ccagatcccgattcctttgtccaaactagccccttgtgtaagaaccaggtgaaagaattctgcagttttaaaccctttttaggtggtatgataataataataatcaacagatttaaacagcatgccaaatatgcagttcacatcatatctatgagactaagaccagtaagttctacaactgtttcagccataaaactgtcctgtcagttggcaaagtcccaatttcagccccagttttccaaagtcgttttcttttgcctcgggtgatcaatgcagaccggatcaaaaacaaacgaagtctagcaacttcacataaccaggaagagttaaaactactcggacaaaaaagggatagttctacaacgtgcatgcctattctacaatctttctaatccgtcgtcattggccgtgcctcgcttgcaggaccagccaacgtttaggctcaatactcggtgagatattgtttaatgcacaaagttaatgcaaggtgctgcctttaagcccatgagtgcaaatagacacagttgaatcactgtcgttgggcaggctgagattgctgcacctgcacaggaggaaagaaccccatgcctgatgattgaaagaatccagctgatgttggtgattgctgtggcgcctgagaggtctgctgctgctggggctggctctgagctggtggaagtggaggtggaggaggtggtccacttagtcccggaaaacctgccggcagaatgttggacaatggaggcggaggtggcatagagccagccatcatcccgaaaggtcctcgcattcccatcattcctccagtattttgaccaaactgttgcatgagcggtggcaatagaggtggcaatggcggtggagggggtgggaatgggcctggagttggtggatgtgtgcctccaaaagaagtaggcactgctccagcctgttgttgcacctgtgacgcttgcccaaaaaagggaggagcgcccgcctcggcctgccctgttttctccagcctaggcctcttatcaatatggaaacctggtggtactccagagagttctccagaaggtgatccgccgtttatggaagcagcttgctcagcggcaaaagatgagagaatggaggtcagcacctgcacaggtgctgacaaagatgcaagcttatctgccatagctgctgccgttctcttggactcatcacccactgcactgactgtagggggaagtgacactgcagggttcagtggttgtgaatggggaggtgtcgatcttactcctgaaccgtgcatcatagctgctgtttgatctggtggagtaatcatgagcggactagaagtagattgtgtatcgttcgtgacaaggacacgacccagttgttgtctaagttgaatggcatgttcagcctctgctcgagcgacttgcaattgatcacggagaattattgacttcgactcctgttcgctgagagcttctttcaattgattgatcagggatatcctcgccctacctgcactttcaagttgttcgatgcactgttttaaggtcatttcctgctcttgaaggtcagagatcaatgatgatgctggctgattaccgttgatgctagcatcgttaatatctttatttattctctccaaaaggcccacagtactcttacatttgtttagagctgtgtcttcatcaaaatgttgatcaaacactgattggtatgcagacacaatcttttcaggcatcccgccaacagtgagtttttttactactgtaccagaatccttccgtgcagctttggaatttgaagtgggattagagctaggatttaaactattcacattgttatccaatataggagggttgtcaccaagaatgctattttgcgtcccgcctggccgacgcccggaaactttacgttggtcccagattaatatcaatctcgccacctgcttcctcccttcctctcccccattttcataaacatgcttcagggatctaggtagaaccctccagaactcatccacatagtctgcccccttgcgtttactgttttgcaggatatcatttgatagatagaggaatggtattttcttctcctcccttgaactagtaaactgtttttcccatgtatctacaacccttttggccctcttgcggtgaaaaatgcaccattgtgaaagtgtctcaatgctagtggctgagttgttgagcctgttgagcttatcaatcagcatctgctcgctaaagaggccgccgccgccactgccgaccccgctgccatctcctgtttctgcgtctacatccgccttcgcgcccgccatcacgaagcctccaactaattctcggtagcgagttcctaagcttgagcctactgccgcggacgaggcgaagagggagtgggaggggaaggacccaaggatggggggagacgaag

SEQ ID NO: 5378 - DNA, 1736 bp, Zea mays
gcacgaggccaaaggcccggtcccccgtcgccggccgggccacgtgcgccagctcctccacccagattttgacaacgccttcccaacttgctcgctcccgcaacgacagcgcgcacttggattcggcgaccaccggagcgcggaggaggcacaggcgccgatctaaagacgatggccgccgcgggctcctcgccgtccttctcctcctcgagtaagcggctggaagggaaggtggccctcgtcactggtggcgccaccggcatcggcgaggccatcgttcgcctcttcatggagcacggcgccaaggtctgcatcgcggacatccaggatgaggccgggcagcagctgcgcgacgccctgggaggtgacgcgcagggcgccatgttcgtccactgcgacgtgacgtcggaggaggacgtgagccgcgccgtggacgctgcggcggagcggttcggcgcgctggacgtgatggtgaacaacgccggcgtgacgggcaccaaggtgacggacatccgcaccgtggacttcgcggaggcgcgcagggtgctcgacgtcaacgtgcacggcgtgttcctggggatgaagcacgcggcgcgcgctatgatcccgcggaagcggggctccatcgtgtcgctggccagcgtggccagcgccatcggcgggacgggcccgcacgtctacacggcgtccaagcacgccgtggtcgggctcaccaagagcgtcgccgcggagctcggccgccacggggtgcgcgtcaactgcgtgtccccctatgccgtgcccacggcgctgtcgatgccgcacctgccccagggcgcgcgcgcagatgacgcgctcaaggacttcctggcctttgtcggcggcgaggccaacctcaagggcgtcgacgccatgcccgaggacgtcgcccaggcggtgctctacctggccagcgacgaggcgaggtacgtcagcgcggtcaacctcatggtggacggaggcttcacagccgtaaacaataacctcagggcgtttgaggattagttgaggcatttatgccagctctgggattgggagggagtattaccgctatttcttctgctgttgtgacaagtgagtgcaagactaataaaccgcagcatgttcatgtagccaacagatgattgaacattccaagtatcattgctgaattcacgcatatagttgctcttcaaatagatcaagtacaatttcgtcctacagcgttgctgctgtggctatataatgaccttccaaaatcaagaagaatctaatcaccagctcgaggttgatgcgaagctacaaaagcatcattatcaagtgagcaggagctttcggccaattcagttacactagcccgtagggcatcccttttcttttcacaatgttaagtaggataccgttactagtgctctcaggctgcagcaaatccccttcgcaaacagccatgctcgtgggagtagaagcctgactggctctggtgttggcagtgttgcatgcctcagtctcagaattttctgtgcatctacctggcatagtaacacttgagctattgttcggcggtggatcgcttgggaaggtaggctctgaccaaatacctgcagcattaccctccacagtgcatgccctagttaattccgtgtcgatctcaaggttatgaatgaaactgatgaacttgtcagcagtatgatgtcctcattagaggcccaccactcctggtccaggaattaaggtcgatg

SEQ ID NO: 5379 - DNA, 902 bp, Zea mays
gcacgaggctccagtctggggctctgggcccaaatacaaaacggttggtgccaaagccgcccgccgccgtaaccctaaccccacacccactcataaaccctccgcctcctcgcctccctcccttccatccaatcctcggaacgagcgcgcgggcgaggaggacccccgacggaggatggcggcggcggctagggttttccgcgggtccctcttcctgatgtccccggcggcgggcgccaaggcgtcggcagccaagaaggcgggcgcggcggcggcggcggcggcggtggccaagaagaccgaggcggccactacgaagccgagactgccgaccgggatcacgaagccgatgccggtctccgatgagttccgcaggttcgccggcggcgcgcccgaggtcgcacgctccgaggccatcaagctcatctgggcccacatcaaggcccacggcctccagaacccagccaagaaaacggagatcaactgcgacgccacgctcaaaagcttgtttggcgggagggacaaggttgggatgctggagatcaacaggctactgaacgctcacttcccgaagaactagcaagcagcagtccgtggggccagtgatcgcgctttggtaaaggactttcttgtggctggcctcttgtggtccatgtgaagtcccaagtcccactaggtggttacgcccgaaaaccgtgtgatgccattaagacttacagactttgttcagcagttgggtttttgggcgtgatgcatgtaaaaaggatccccagtgtttctgtttctcttgtgatcctgtgaggacaccgatgtgggaaatctttaagtctgctaatggcaaatcttattagtctttaaaaaaaaaaaaaaaaaaaaaaacccgcgggggggcccggtaccca

SEQ ID NO: 5380 - DNA, 2574 bp, Zea mays
aaactggcattcgattcgcagcccaccagctccggtttcttccgactgcgagcttccaagtggcgactgcccgagtgcgagaagagggagagaagcggttgtcggaatccactccggccaggggtgcggaggtcggaatggggggaggattggatgaggcggtgaaggtggtggatttggaggacggtgaaggggaggaggaggcagaggccgccgcggcggagggatcgagcatggagatggggatgctgccaaggatgccggtgcgtgtgctgctcgccgaaggcgacgactccacgcgccacgtcatctccgcgctgctccgcaagtgcggctaccgagttgctgcagcctcagatggtgtgaaggcgtgggacctattaaaggaaaaatctttcaaggtagaccttgttttaactgaagttgaactgcctttgatgtctgggttcctcctgttatccacgatcatggaacatgatgcgtccaagaacatccccgttataatgatgtcttcgcatgactcagtaagcatggttttcaaatgcatgctaaagggtgcagcagatttccttgttaagccgataagaaagaatgaattaaggaacttgtggcagcacgtttggagaaaacaactggcaaacggtgggcctaatgttcagcacatacaacgagaagagaatcttgcagaaagaatccaacagaagactggtgtgacaaaagctgataatttggacagagatgtgccctgtaaaaatagagaatgcagtgaacaagaaagtgatgctcaaagttcttgcacaaggtcagagctggaggctgaaagtaagcaaacagacaacattttggagtataagcaatcaactcaaaggcacttgtctattcctagccacaagaatgttgagctaaatggacagaccaaaatacaaagagctaagggtaataacttgatcccagcaagcgaagacgatttatcgccaaagaaaagaacgtgtttgaatgagaataattctgagagagcttcaagagatatggagctagtccacattatggaaaatcagcagaagtataacacacagtgggaggtggatactatgagaacaacatctaggggaaatgatgagaagggctccatcccagcacatcagttggagctttctcttagaagaactgactacggaaaattagagaaccacgagaaaaatgatagaagaacactgaaccattcaacttcctctgcgttttccttgtataattgcagggctgtgccaaccttaggaaatgctggtgatggtcaattatgcagcacctcagaaacactagtggatgttgaaaataaaaatggagattcagcagatccctctcaagacatgactgaaacaaatcgtcctcctattagagttgttcctgtccctgtccaaggtctcacatttgatgggcagccattctggaatggtacaccagtggcatccctattctactcgcagtcaactcctcccatttggaatagcaaaacatcaatgtggcaagaatcaaccccacaagcaacttcactgccacaaaaatctcgacagaatgaaccaaatgaaatgggggctaaaccagttataaatgcaggggaacaatttgccatgggtcctcccagtgccagtgggaagcagctgcatgttgaaattcttaatgatgatccacggcatatttctcctatgactggtgaaagtggaatcagtaccgtgctagacagcaccagaaatactctgagcagtagtggctgtgatagcatttccaaccagatcactgcccctactgaatcatccaatgtatataaggatgttcctgaaaccccaagcgccgaagggtcacggcatctgagccagcgtgaggctgcactgaacaagttccggctaaagaggaaggataggtgctttgagaagaaggttcgataccagagccggaaattactcgcagagcagcgtccacgggtcaagggccagtttgttcgtcaagatcatagcatccaaggaagctagggtccagttactgagctggaactctattctattatctaaaaaaagtcactgcaagtgactccactgcggtctgcgggtatcctgatgtcagattttgccgaagagttggaagcagtcacactgagttacagtttgctctgtatatttgctgaagtttgtaatatatgtatgtataggctaacgctgttctttcctaggttaggcacaggacctggcacgtttgaaggtttatcagtaggcgttagaaaatacaggcatactttgtttcaggtcaagatgagatgtgaccttcagtagcgcatgtgtgctttaagtcttgtattacgtaattaagttgtttgatgtttcgggttagatgtacgctccgtggatgaaatgtaaaggatgtccaccaaaacatgcttgtttccgtgcagcttgttgcaatgaacatcgttggcctggtttctgtcgaaaaaaaaaaaaaaaatgcactactgtgaaattttctgcagacggtatgaagtgctactctgaactcgagtgatcggttatgtgagcaggggta

SEQ ID NO: 5381 - DNA, 1192 bp, Zea mays
cattgggtacctcgaggccggccgggactccactgtgctcctcacagtcccaccccgccggggcggcgcggagcgagcacgccgtcaccttctccaccccccgcccctgcccctgtgtgggagtaggtgtagccgcgtaagcggcagcggcgtaggcctcagctcggctcagctgccgcctcgctcgaaccagaggagccaagcagaggaagcgaggcggagatgtcggcggggctggtgaccgacgaggccaccgtggggcggctgtaccggatccggcgcacggtgatgcagatgctgcgtgaccgtggctacctggtggtggaccacgagctcgccaccagccgccgcgacttcctccgcaagttcggcgagtccttccaccgcgaggacctcctcatcaacaagtacaagaagaacgacccatccgaccagatatatgtcttcttccccaacgatgacaaggtagggatgaagcacatcaagaagtacgtcgaaatgatgacgcacgagaacgtctccagagctgtgctggttctccagcagaacctaactccgtttgcgaagtcgtttctcatagagctggagccgaagatccatctggaaattttccaggaggccgagatgcttataaacatcaaggaacatgtccttgttcctgagcatcaggtgctcacaaacgaggagaagaagacgcttctggagcggtacaccttgaaggaaactcagcttccaagaatacagatcacggatcctattgctaggtactacggcctgaggcgaggccaagtcgtgaagatcatcaggcccagcgagacggcgggcagatacgttacataccggtacgttgtatgacagaacgtcagaacactgaagaagaagagaaccacagatatgtcaaaaaaaattcaagctacacataccccacgtgcttgcagacatctgtatcgctttgtagcagcagccactggtaacgatcggtggctgatgtgtaagtgtaagtggattgaataagctgagtcagagcatacgagaattctcatgttgtacacttgtgttttatgaaccgcataaacactcacgacgataaaagaagcctgttttcggagcgacagagaagctcctgcgatcaggatttcggatttcgccaaaaaaaaaaaaaaaaaaaaaaaaaaaaaaaaaaaaaaaaaaa

SEQ ID NO: 5382 - DNA, 2150 bp, Zea mays
  misc_feature (48)..(48): n is a, c, g, or t
tttcccccccccccctttttaaaaccccccccccttaattttattttnttcccacaaaaaaaaaatttattttttcaaaccccccttcttaaaaatttaacccttaaaaaccccccccccttttttttttttttttttttttttttttttttttttttttttttttttttttttttttttttttttttttttttttttttttttttttttttttttttttttttttttttttttttttttttttttttttttgctactctgattaagcagatgcattacttattgctccataacaaggaacaactgtcgctatgcaaccgactacaagattccagcccagcactttactgaaataaagtttgaaaatacactgtatattggacactgccatcaccatcctcaccgtcgttacaaccagcagcatcggctaattcttcctggatttcagttctacaatccgttcctctgtagccttcagagcatcgccgaatttgcttatgatttcttcgacttcattgggagtcatgatcagcgggggtgacagcatgatgctgtccccagccaccctgatgagcatcccacgcttctcgcactccgcgccaaatatcgaaccaacaccccattcagctggaaatggatcatttggagatttgttgtcgacaaattcagttccaagtatcagtcccagaccgcgtatctccccaacaattgggctgcctgagaaggccttgattccctcctggaaccttggagcaattttgttaacgtgttctacaatattcctttccttatatatcttcaaggtttctacagcaacggcacaagaaacaggatgtcccgagtatgtaaagccatgagcaaaagaaccaagtttattgctctgagaatagattacatccgttatttctgggctaacgagaattgctccaattggcatatatgcagaagaaagagccttggctatggaaacaagatctggtttaatattatacatatcacatccaaacattgtccctagtcttccaaatgcagtaatgacctcatccgcaattaacaagatgtcatacttcttcagaactgcctgaatcttctcaaaataggtctttggaggaaggataacaccaccagcgcccatcacaggttcagcaatgaaagcagcaattgtttcaggtccttctttgaggacaagattctccaaattattggcaagtctagttgaaaactcttcttctgtctcatcaggaagacggaatcgccagtagtgagggcagtctgtgtgcaggacaaaaggtgctggtagatcaaacttctgatgaagcgctggcagacctgatagactagctgcaatcaaggttgatccatggtacgattttgagcgagcaataaatttcttcttgtctggccttcccagtgcattattataataccacactagtttaacctgggagtcatttgcttctgaaccactatttgtgaagaacacctttcccatttcccttgcggtgaacatgctgagaatatcatttgcgagatccaatgagggtttggttgtacggttccaaaaggaatggtagaacggtaatttgtttaattgctcagttgccgctttgactagtcgaggctcattaccacctaaagctgtgcaccacagtcctgcaagagcatcaatatacttcttcccattgctgtcatagacataagaaccctctgatctctctataaccaatgggtgtacatcagtgctctgccatcccgctgtgaatggagccagcatgctgtgccccttaaacccattttcttctgtcgcctgaagtgaaggttcagagctgtaatgtctggcagacggctctgataaactgtgccccccttgcaagcttccagcactagcaatgtatttcaccagcttgctaacctgggaggaggcagcactggatttgcggaggccgtttgcgatcatctcgtatcgcctgggttccggttccgccgacctcctcacttcacttcacgggttcttggaagttggaactggggaggaaccgaggaagcaacacgcgagagggacaagctctgggtggtgccggacgacggggacgtgacggaatctttatcccgtccataactgtcgccgccgaaattgcgggcgccaatgg

SEQ ID NO: 5383 - DNA, 1612 bp, Zea mays
ccccccccccccccgccgtcccaacgccgtacccaggggccaggggtgggcgggcgcaccgcaccgcacgtcgctgtcgcgcgtcggcccggagaacgcgtacgccgcccgtctcctccctccccgcgataaaaggccttcccctcctccccagcccccaccagctcaggccagccgtgcggcagcttctcccctcgcctccccccctcgtctccgcacagagagggctcctcgctgccgtgtgccgggcttcactttcccctctcgtctcctctcccatggctcagcgcgacaagaaggtggaggagccgacggagctgcgcgcgccggagctcacgctgtgcgccaacagctgcggcttcccgggcaacccggccaccaacaacctctgccaggcctgcttcctggccgccacggcttcctcctccgcctccgcctccgtctcgccgccgccgccctcctcctcctcctcgtcgccggcggtgctccagttcgacgagcagcagcagcagcaaaatccgaggccgcgtgcgccggcggcgtccgggcccacggaggaaccgcccaggccggcccgggcgtcagctccggctccggctccggcgtcgtcctcgtccgtccgccggtgccagacctgccgcaagcgggtggggctcacgggcttccgctgccgctgcggagacctcttctgcggcgcgcaccgctactcggaccgccacgactgctgcttcgactacagggccgccggccgcgacgccatcgccagggacaaccccgtcgtgcgcgccgccaagatcgttaggttctaggcgtctcggatccggccggaggagctagctagctagctaggggcgggcacacacacgcacacgcggtgatgggcgccgagatccgtcgccggtcctcatcgccctctatagtccgtccccccttcctctcctcctctccctctttgattgtcctctccttttcttcttgctgtcatctatttttattgcgagggggaaaaatgatttgatggtcaccgatcgatccgtccatggagggtgttggttatgtgttgatcgccatgctgttctagaaaattattccgtctacgaggacgacgatcgacgagaagcgtcgaaaaagagaggggagagagaatgaagacgaaaagaatagtgcgatgataacgttgttgttgttgtttgtagcggtggtggtggtggctggtggaagcgatatggttcggttcggttcggtgtgctcttgtcctgctgcgaatcacaaattcctgttgaattttttttatatatctttgtataaaacgaaattgaaaatgtttatatggtgtgccatgacagctataatactacccatttcattcgtaaaaaaaaaaaaaaaagtgttgtggtggtgaccggtgcggtgtgctctaccacaccatcatggttggttggatggatggatggatcagctcaccagctgctaggagagtagccgacctaaattattattttacatatcgtagagccagacgacagagagagagctcaaagctgtaccactcgagctggaaaaaaaaaggtcctccacccaataatctttgtgagcatccagacacaggcaa

SEQ ID NO: 5384 - DNA, 2236 bp, Zea mays
ggcggggagcttcgcgtgcggcgtggacgatggcgcgcgcgccgtgctggccgccggcgctgtcggccacatcactcgcctcctcgctcaccccgacgagaaggttgtggatgcatgcgcacgtgctcttagaatgatatatcaatcaagattagctccaaagtttgatggttatagtggggaaaacgtggattttgttctttcccttttggacagtgagaacgagaatgtcacagagctggctgctgctattgtatctcactcttgtgagagtggtgcagaacaattgtcactatgcagtgctggagttccacagaaacttgttagtctttttggatgttctatgaatctacgagatgcttgtttaggttctatcattgcagttattcaaaataaccaagatgttgcttcaagatttgcatcaacggaccatggaaaaggttttcgttcagtagttgggttaatacatgatcggagtccacgcacaagattacttgcttgcctctgcttgattgcacttgggcatgcttctcctgatcattttcaggacaatcagattaagaccaagttgattatggttttacttgagctaattgaagaacctggtcatgtaggagatgaagctcccttggcattaaccaccctgattaaagacagcttcgaactgcagagacaagctcttacaacgaacgcagttgagaagctcagcaaccatctactagcaaatccattggggacaaggcgagcagtgaccatattacttgcgctatctgaactttgctcaaaacttgaagagtcaagatctcaactgatgtcggttgaggtatcaaccttactccttgaggcattgaaacatgattgggctgatatccgtgttgcagcatgttcatgtctgaagaatatctccaggtcaccaaagatactcagtggaggtcgattatcctgcgatacagttatcggtcccctggtccagcttttaaatgactcatctacttcagtccaggttgctgcccttggtgccatttgcaatattgccgttaatttgacacccaggaaatcagttcttcttcactccggggttgtctcacaacttgttcatttgtcaaagtccatggatccaatgttgaggctaaaatctgtatgtgctctcaggaatattatgttccttcttagtcctaaggataaagacttcattgttaaggagttgaccttatctactctttcaagcctcatatgtgattctgaacattttgttcaagaacaaacattggcacttgtgcacaatcttgttgatggatatgtggtctctgctaattatgtcattggtgaagatggaatggttatggatgctattgcaagacaactgaacaatgcatctgctccgggagtatgcattcagggtatgtatgtgcttgcaaacattgctgcgggaaacgagtggaacaaggaagctgtgatgaatgttcttctgcctcacagagcagatcgcatcaaaccgtcgtttgcagtgaactttctgaaaagcaaggatagacagttgcgagttgccacactgtggtgcgttctaaacttgatatacccaaaatgtgaagcctcatctggtagagccgtcagactacaaagtgctggagtgatcctacaagtgaaaagaatgataaatgacccctgcttggattgcaagcttagagttcgtatggtgcttgaccactgcttggacaacgctgatgattgtttcatgtgaacaacctgtatttcaccgtggcaacccaagtttacggaactatattcagatcaggaaagaggaaaccagtgtgcttcagatccaaatatatgccactgaacagtggacatgagcacctgcagaaagcttttgctgatctctgcgggtcttcaagaaccagctgccttttttgcaccatgagaacctgacaaccggcatctgttgtgcatattgtccattaccttgttgtgaccgatgttgtctagtgaacttgggctgcctgctcgcagtctgaaaggctttaggcgctatggatccagaaatcccatttttcccagtgcctgccgaacctggtgcatgcttttgaagttgagtctgtaaatgagtgactgctgtaactgttgtacaaaatttgtatttctgttccaataaggccgtatttaacatgcacctatgggttagatgtccatggattcccatgttctatgaaaataaagaagatgcaagtttctatgc

SEQ ID NO: 5385 - DNA, 1576 bp, Zea mays
gcaatattccagaacacagcctcagcaccttccttcttctccgtctcgtcgtccctttccatttcctctcccatttatgtccccgcttcaggtctgccaaataaacccccgaaaagcaggagagcgagacccggtagtggaagactagggttagggtcccagctccgccgttgtctgggcgagtcgagacatggccggccctgcccccgccgttgcagccagtgccgccgcctcacagtcgccgccgatgcagctgccgtcgccgttcgcggagctagtcaagggttcctccggcctcgagaagatcgtgcttcgcggcgctcgcaactgctgtgccgagatctatctttatggaggtcaagtaacatcatggaagaatgacaatggggaagagttgctttttctcagcagcaaggctattttcaaacctccaaaagctattcgtggtggtataccaatttgctttccccaatttggaacacatggaaatcttgagcaacatggatttgctaggaaccggttttggactatcgacaacaacccaccccctttaccagtaaaccctgctattaaggcttatgttgatctgattttgaagccttctgaagaggatttaaagatctggccccacagttttgaatttcgcttgagagtttctcttggaccttctggagatctgagtctcacatcccgaatcaggaataccaacacagatggaagacctttctcttatacatttgcatatcacacatacttctctgtctctgacataagcgaggtgcgtgtcgaagggctggaaacaatggactaccttgacaacttgaaggcaaaggagcgtttcacggagcaaggcgatgctattgtttttgaatcagaagttgataaagtttatcttgccgcaccctctaaaattgccatcattgatcatgagaagaaaagaacatttgtcgtgacaaaagaagggcttcctgatgctgttgtttggaacccttgggacaagaaggcaaaagcaatgcaagattttggggatgcagaatacaagagcatgctgtgtgtggagcctgcagctgttgagaggcctattactctgaaacctggggaagagtggaaaggaaggcttgtgctttcagctgttccttcgagttactgtagcggacagttagatccatcgaaggtccttcagggttgaaaatcctcactttctgcatcttgtacagaagttcattgcccttaatatttgatgctgggctggcgtcaacgccgcatgttccttttgccatttccaccccctatatttctggtcccttttgtatctagaatttgagtgataggttgattccgaataacagtctgtgatttgagcttaggattgggtcatctcatcgatgaatgataccgctggacaaaatgctggcgtacgtgtcagtttcataaatcattcttctcataaattctttagcatgtacttcgtagttgatcatgtttcaaaaaatggtggacccttttgttactttcttgtctgataaggtttcgatcggtggttaaaaaacaaacaaaaaaactcgctcgtgccgaa

SEQ ID NO: 5386 - DNA, 1776 bp, Zea mays
gcacgagaccattacctagaacatcctaatcgaaaaactctctcccgcgggtctcggcctcctctcctcggctcgctataagcaggctccaccgcttccgcaatggccacctaattcgctcggcgtcgggggagaagagaagcgcgcgcgatggcaccgggaagatctcttcgccctgcggggacggcggcggttctgtgggcggcgtcgctgctgctgctggcgacgtcgtgcgcgcgcgcaggtggcgcgtacgcggggccggggtgccggaagcacgtggcgagggtcacggagtacggcgcggtcggggacgggaggacgctcaacacggcggcgttcgccagggctgtggcggacctggcgcggcgcgcgcccgacggcggcgctgcgctggtggtgccgccggggaagtggctcacggggcccttcaacctcaccagctgcttcacgctctacctcgacgagggcgccgagatcctcgcgtcccaggacatgaagcattggcccctcatagctcccctgccgtcctacgggagaggaagggacgagcctggcccaaggtacagcaatttcatcggaggatccaatctcactgacgtcatcatcacgggcaaaaatggaacgatcaacgggcaggggcaggtctggtgggacaagttccacgccaaggagctcaagttcacccgcggccacctcctcgagctcctctactctgacaacatcatcatctccaatgtcaccttcgtcgacgcgccgtactggaacctccaccctacctattgcaccaatgtgaccatcagtggcgtcaccattctcgcgccggtgaattcgcctaataccgatggaattgacccggattcttcctcgcgtgtcaagatcgaggactgctacatcgtctccggcgacgactgcgtggccgtgaagagcgggtgggacgagtacggcatcaggttcaacatgccgagccagcacatcgtcatccggaggctgacctgcgtctcccccacgagcgccatgatcgcgctgggcagcgagatgtccggcggcatccgcgacgtgcgcgccgaggacagcgtggccatcaacacggagtcggccgtcagggtcaagtccggcgccgggaggggcggcttcgtcagggacatcttcgtgcgcggcctcagcctccacaccatgaagtgggtgttctggatgaccggcaactacgggcagcaccccgacaacacgtccgaccccaacgccatgcccgaggtcaccggcatcaactacagcgacgtgttcgccgagaacgtgaccatggccggcaggatggagggcatccctaaggacccctacaccgggatctgcatatccaacgtgaccgcccgcctcgcgccggacgccaaggagctgcagtggaactgcaccaacgtcaagggggtcacctcccacgtctcgcccaagccgtgcccggagctcgccgcggagggcaagccgtgcgccttcccggaggaagagctcgtcatcggcccacccgagctgccgaagtgtagctattgaggccgattgccaaaagagatcattgatcatataggctcttcggtgatagtctagacaaccagtatgagaaatgcagctgaaatacgtttgcattacagtgtccgtctcacattactgcttcctccgattacaatgtctggcagtggtataacttgtgactacaaattatgcatcaagaagaaatcagcaaaacggacatgatcattgcaaacctttttcataggtgcacaagtt

SEQ ID NO: 5387 - DNA, 2699 bp, Zea mays
gcaaggcaagtagccgctgcgcggtgctgccacctgacctgactgccgtcccggtccccggtccatccgaacgccgttacggggccgcccaccgcgacggaacggaaaggtgcggtcaacccaccccgtcccagtcccatcaccgccgggggccgggtggataaacaaacccagcggcccccgcccccggcccgcctcattcccttccttcctttgctcctcccctgcctcgcctctctcccctctcctcgcctccagctcctgctcggcccgctcgcgtccagctgcgcgcgcgcctgcggtggccgtgaaggacagcccgagggacgcgccgggtgcactgatctgggggccgcgtgtccccggtggtggggcgaggcggcgccggcttccaggaatgggcagcttgtagtggctgtttcttttgcatatgcactttctattgttgttgtcatttcaaaggaggccatagtctcctggattttgtatgccttgttatctggaattggtgaccatagatgtcatttcgtagcatagtccgtgatgttagggatggcttcggcagcttgtcgaggagaagctttgaggtgaccctcgcaagcatttatggccttactgggcatcacaaagggaagacccagagctcatcacatgtgctcgacgactcaccttccataattcgtgaaagtcgatgggcgaatctacctcctgaactcatccgtgatatcatacggagactggaggctgatgagagcacctggccagcgcggaagcacgtcgtttgcttcgcagctgtttgtaggacatggagagaaatgtgtaaagagattgtgttgagcccggagttttgtggcaagctcaccttccctgtgtctctaaaacagcctggtcctcgagatggaaatacaatggtccagtgttttataaagaggaataagtcaaaatccacttaccatctctacctgtgccttagcaatgttgttacttcagaaagtgggaaattcctcttatcagctaaacgacaccgcaaaaccacatgcaccgagtacactatatcaatggattctggcaacatctcaagatcaaaaagaacctacattggaaaaataaggtctaacttccttggcacaagatttttaatttatgatacacaaccgccctataatggggctgtagttcctcctgccggaaggacaagcaggaggttcaactccacaaaagtctctccaaagctgccttcagtcagttacaacatcgcacaggtatcgtatgagttaaatgtccttggcacgagaggtcctaggcggatgcgttgcatcatgcactccatacctgcatcatcagtggagccaggtggcacagtgcctggacagccagagcagattgtacctcgagccctggaggattcattccgcagcacggcttccttctcgcagtcgttccgtagcactgcctcattctccaagtccatcatggactcatccatggatttcaatagcgctcgcttctctgacatcgctggcagcagcgctcgcttcacgggcgttcctggtagcagcgctcgcttcgcgggcgttcctggcagcagcgctcgcttctcgggcattgctggcgccagactggacaacgacgaggagagtgaaaccaaggagaggccactggtgcttcgtaataagccgcctaggtggcacgaacagctgcagtgttggtgcctcaacttccgtggccgtgtgacaattgcctcggtgaagaacttccagctgatcgccgcggctaccccgccaccggcaggtgcgccaaccccctctcagcctgccccgtcagatcccgacaaggtgattctccagtttggcaaagtggcaagggatatgttcacgatggactatcgctaccctctctcggctttccaggcctttgccatttgtctgagtagctttgatacaaaattagcctgtgaataaatggagaagaacaaaggtaaaggagaacatcaggttgcttgcattaggccatcagtgtacctctttccatctggctctcgtgttgccttggttgtatttgtgcttaatgtagccatgaagttggtggccatatatggacgcatgtgttgttgttggccctctcccttagaagtgattaaaagttgcatttggaccacatgttacccgatctgtaatatacttgcagtggcattgcatgccgcgtgataacaaagttcccgttcgtgattggacttgtatggtttcagaaaagcagcaaacaaagtttggtacggtgtgcatttttttttcctcgtctctggattggttactgtttgaagtgaactgcatcttgtctttcgcccctgtgtcttttgagaagcgagcaagagggctttacggctttgtctcacctcaaaagggatcgccgccgagtgccaaaccccacccacccatacatccatccttttatcagtggttatgagcacgactatatgtaatcatcattgcctgcattacctacaacgcgtatccctcacagcgttgcgcattagattcagatttagacgggcaacaatgcctgtgtgtgacatgggagctcgagcatcatatcacatgaacctgcttgtgcatgccttttcggcccgaataaagccgagctctttcggtgtggccctgtcttttgttatgagttgtttcggggggaagacgccggaacag

SEQ ID NO: 5388 - DNA, 1177 bp, Zea mays
gcggtgacgaccgacagagccgccgccttacgtccagctgccacggtacttcatcgggccctttgccggtgcaggcggcgcagcacccaccgcaccaggattctgattgctcttcattaggctataaatggcaggaaggcaccgggcaccccgacaataccatgatgaacctcgaggataccgtgatggtccaccacctccacttccacgaccaagacctctctcaccgcgtcgcatggcagaggaactgtctaggcgccgtgctgagatccgtagaatccatgaggacaatcagcgtctggcggatgaaattgttagtctcaagcaaaccatgccgcgtttgcaagaagacctccgaatctcaagccaggctgttccaaagctccgggcagagaaagagctcgagtcgagggagctgactcagaggaacctgaagctggaagctgagctgcgtgccttagaacccctcaggcaagacgctctgcatctgcgatctgaagcaagtaaactgcagtctctgaggcaagagttggctgcgaaggttcaaggcctatcaaaagagcttgaacttcagaagtctgaaagccagaaaatgactgctttggtagctgaacgtgatgcgctgtgtcaagaactgctccaggctagggcgaaccttgagtttgagaagaaggcgaagccagagctgactgcgcaggttcaggcaatggagaaggatcttgtggctatggctcaggaggcggagaagctgagggctgatatcgcgaagagaaacacacctactagtttcagcagccgtggaacgtatggagcctcgttgtcgactcctgggatgggtttgcaaggcatgtatgatggcggcggctattctatggctgggagccgctacggcagtggcactggggcttggagctcgcacgatccccatggctacccgcatctttaactgtgcttctgaccggtgtttcctcctgaacagctccctgagtaccttggctaagtttcttgtagtagtataacttgtggtgcaccattgctacccttcctctggtcaatacacaacaatataccaactttggttgtcttggttgtttttcccctactgcacacggtgacgctgttgtgagcattagatgtttggccactcggccgttttgccgtggtgagttttggcttt

SEQ ID NO: 5389 - DNA, 3788 bp, Zea mays
  misc_feature (3220)..(3220): n is a, c, g, or t
  misc_feature (3222)..(3222): n is a, c, g, or t
  misc_feature (3229)..(3230): n is a, c, g, or t
  misc_feature (3246)..(3246): n is a, c, g, or t
  misc_feature (3250)..(3251): n is a, c, g, or t
  misc_feature (3253)..(3253): n is a, c, g, or t
  misc_feature (3263)..(3263): n is a, c, g, or t
  misc_feature (3266)..(3266): n is a, c, g, or t
  misc_feature (3275)..(3275): n is a, c, g, or t
  misc_feature (3286)..(3286): n is a, c, g, or t
  misc_feature (3291)..(3291): n is a, c, g, or t
  misc_feature (3294)..(3295): n is a, c, g, or t
  misc_feature (3299)..(3299): n is a, c, g, or t
  misc_feature (3304)..(3305): n is a, c, g, or t
  misc_feature (3308)..(3309): n is a, c, g, or t
  misc_feature (3314)..(3314): n is a, c, g, or t
  misc_feature (3317)..(3319): n is a, c, g, or t
  misc_feature (3321)..(3322): n is a, c, g, or t
  misc_feature (3327)..(3327): n is a, c, g, or t
  misc_feature (3332)..(3334): n is a, c, g, or t
  misc_feature (3336)..(3336): n is a, c, g, or t
  misc_feature (3339)..(3341): n is a, c, g, or t
  misc_feature (3343)..(3344): n is a, c, g, or t
  misc_feature (3347)..(3347): n is a, c, g, or t
  misc_feature (3353)..(3353): n is a, c, g, or t
  misc_feature (3355)..(3355): n is a, c, g, or t
  misc_feature (3357)..(3357): n is a, c, g, or t
  misc_feature (3367)..(3367): n is a, c, g, or t
  misc_feature (3375)..(3376): n is a, c, g, or t
  misc_feature (3378)..(3379): n is a, c, g, or t
  misc_feature (3381)..(3381): n is a, c, g, or t
  misc_feature (3384)..(3384): n is a, c, g, or t
  misc_feature (3390)..(3390): n is a, c, g, or t
  misc_feature (3392)..(3393): n is a, c, g, or t
  misc_feature (3395)..(3395): n is a, c, g, or t
  misc_feature (3401)..(3401): n is a, c, g, or t
  misc_feature (3420)..(3420): n is a, c, g, or t
  misc_feature (3430)..(3436): n is a, c, g, or t
  misc_feature (3438)..(3439): n is a, c, g, or t
  misc_feature (3445)..(3453): n is a, c, g, or t
  misc_feature (3455)..(3458): n is a, c, g, or t
  misc_feature (3460)..(3460): n is a, c, g, or t
  misc_feature (3464)..(3464): n is a, c, g, or t
  misc_feature (3467)..(3467): n is a, c, g, or t
  misc_feature (3475)..(3475): n is a, c, g, or t
  misc_feature (3478)..(3478): n is a, c, g, or t
  misc_feature (3492)..(3493): n is a, c, g, or t
  misc_feature (3497)..(3497): n is a, c, g, or t
  misc_feature (3499)..(3500): n is a, c, g, or t
  misc_feature (3504)..(3504): n is a, c, g, or t
  misc_feature (3513)..(3513): n is a, c, g, or t
  misc_feature (3519)..(3519): n is a, c, g, or t
  misc_feature (3521)..(3521): n is a, c, g, or t
  misc_feature (3524)..(3524): n is a, c, g, or t
  misc_feature (3526)..(3526): n is a, c, g, or t
  misc_feature (3531)..(3531): n is a, c, g, or t
  misc_feature (3534)..(3534): n is a, c, g, or t
  misc_feature (3537)..(3537): n is a, c, g, or t
  misc_feature (3542)..(3542): n is a, c, g, or t
  misc_feature (3547)..(3547): n is a, c, g, or t
  misc_feature (3551)..(3552): n is a, c, g, or t
  misc_feature (3554)..(3554): n is a, c, g, or t
  misc_feature (3560)..(3561): n is a, c, g, or t
  misc_feature (3566)..(3566): n is a, c, g, or t
  misc_feature (3571)..(3573): n is a, c, g, or t
  misc_feature (3575)..(3575): n is a, c, g, or t
  misc_feature (3577)..(3577): n is a, c, g, or t
  misc_feature (3579)..(3579): n is a, c, g, or t
  misc_feature (3581)..(3581): n is a, c, g, or t
  misc_feature (3583)..(3583): n is a, c, g, or t
  misc_feature (3589)..(3591): n is a, c, g, or t
  misc_feature (3593)..(3594): n is a, c, g, or t
  misc_feature (3597)..(3597): n is a, c, g, or t
  misc_feature (3600)..(3601): n is a, c, g, or t
  misc_feature (3606)..(3606): n is a, c, g, or t
  misc_feature (3608)..(3608): n is a, c, g, or t
  misc_feature (3614)..(3614): n is a, c, g, or t
  misc_feature (3616)..(3616): n is a, c, g, or t
  misc_feature (3622)..(3622): n is a, c, g, or t
  misc_feature (3626)..(3626): n is a, c, g, or t
  misc_feature (3631)..(3631): n is a, c, g, or t
  misc_feature (3633)..(3634): n is a, c, g, or t
  misc_feature (3648)..(3648): n is a, c, g, or t
  misc_feature (3650)..(3651): n is a, c, g, or t
  misc_feature (3664)..(3664): n is a, c, g, or t
  misc_feature (3683)..(3683): n is a, c, g, or t
  misc_feature (3689)..(3689): n is a, c, g, or t
  misc_feature (3691)..(3693): n is a, c, g, or t
  misc_feature (3696)..(3696): n is a, c, g, or t
  misc_feature (3702)..(3702): n is a, c, g, or t
  misc_feature (3707)..(3707): n is a, c, g, or t
  misc_feature (3709)..(3709): n is a, c, g, or t
  misc_feature (3715)..(3715): n is a, c, g, or t
  misc_feature (3724)..(3724): n is a, c, g, or t
  misc_feature (3726)..(3726): n is a, c, g, or t
  misc_feature (3728)..(3731): n is a, c, g, or t
  misc_feature (3738)..(3738): n is a, c, g, or t
  misc_feature (3742)..(3743): n is a, c, g, or t
  misc_feature (3753)..(3753): n is a, c, g, or t
  misc_feature (3756)..(3756): n is a, c, g, or t
  misc_feature (3764)..(3764): n is a, c, g, or t
  misc_feature (3766)..(3766): n is a, c, g, or t
  misc_feature (3769)..(3772): n is a, c, g, or t
  misc_feature (3777)..(3777): n is a, c, g, or t
  misc_feature (3782)..(3782): n is a, c, g, or t
  misc_feature (3784)..(3784): n is a, c, g, or t
agcgactcgtttctcgtctctgcgctgcgagcgaggctcctgctcctcgcggtctcgcttccctccaagttccaatccagcaccgggcgccaccgctaatcagtgctgatatatgaaccccgcatttggacatttggtggtggcaaggcaacgccaaccttccctgttgctgctttgaatgttctggtggttgtcggatggatcgccgcagttggctctggaagcgcaagtcattggataagagccctggggagagcgatagctctggctctgcttcatcacactctgagccttccttcgatgatcaggaacctaaacctgtgtctagtaattcttctccaaatcatagtcattcgcctgatgtttcttctagaataatttataatgagaatcaagaagctgaaagagcagaatcattgaatgagaagctggtgttagcaactagctcgaatgattcttctccacaacatgatcaatcgatgaagccagatatataccaatcacctctgctattcccaaatatcaggaatgatgatgttccagattctgtaaagaatttgaatgagaaggtgtccccaaagtttaaggtcgatgatgtccaggattctgtaaagagtttgaatgagaaactttctgctgcccttttgactatcaatgataaagatgacttggtaaagcagcacactagagttgcagaagaggctgttgcaggttgggaacaagctgaagctgaagttgcttctctgaagcaactacttgaaactgcatcaaagaagaatacctctctggaggatcaggtcagccacctagatgacgcccttaaagaatgtgtaaggcagcttcgccaagcacgtgaagaacaagagaataaaatccatgagacagttgctaagaagtctaaagaattggagtctgagaagtttgagctccagcaccatattgctgaactcagtaagcagttgcaagccacgaaactagaagctactacggtgcgtgtccagcgtgatctgcaggaaaagcttcagatagtggagaaagaaaacaaagacctcaaggtagaattactcgcactgtccaaggacctgaagatacttgcacgggaaagagacctgagcaaccaagcagcagaaacagcaagcaaacttcacctggaaagtgtgaaaaagataacaagagttgaggcagaatgccttaagttgcgtcatttaacgcggcgtacgtccttgaccaatgattcaaggctgataactaacagtgcttgcatggaatctcagactgacagtcagtctgacagtggggagcacatgctagttgatgagatgaaaaattctgattcatgggcaacagctctgatagctgaacttgatcagttcaagaatgccaacaacgacacaagaaatcttgtgaataattcggttgaaattgacctgatggatgatttcctcgagatggaaaagctggctgcactgcctgaagtagactgtgtaagctctagctttggagctgaaactgattctgaccaaggtgtgagtagagataaatcatcaaaagttaaaactgaaccattgcagtgtcaggtgacagatttgcacgcaaagatcgagaagattgaaggtgagaaaagggagcttgaaatggcccttgcagatgccagagttcagcttggcacatcatgtgatgctctaatggtggccaacaacaggttgattgatttgcagatgcagttggacttggcaaatgagtccaaacatgctgctttcggagaagctgagcgactgaatggtgagaggaaagatttggcattgcaactggagtccaggtcttcacaagttgatgagcttcagctgatggtggcatcgctggaaaagaatgtagacaggaaggtgttggaattgcagttagagttagtttctgtggaggctgcagatctgcgcaagacagtggcttccctggaagagaagattgatgcagagataactctctctatgcagcacaaaacaaatgcagacctggcagaggcgtccaaagaatcattagaggcgcagctgcagtctgcaaacacagagatagggaaactgaacgggattgtgcaaactttagagaatgaggtgaggaaagagacagattctcgtgaagaactactgaaacagatagaggctatgaaaattgagtcagagagatcactatctgtggtgtctaccaaagagtcattagaggtgcagctccaggtggcgaattcagaagttgcaaagttgcgtgggatggtgaatgctctggagtgtgatgcggcgaacgagaaggcatattcttcagatctccagatgcaacttgaggcagtggaaggtatcaggaaggtgttggaatctgagcttgagtcttcacaccaggaggtgatgaggctgaaggagaaagtttcgtccttggaagcaaggatcaaggaccagacctcgttgcttgtagaatatacagctaaatcagaggatgcagtgtcccggaaaaaggcaatggagggtcaactagaagcagcaaatctggaagttacaaaactgagaaacaaggtgagcctgatacaaggcaaggtggagcaggagaagcttctgtcagaagagtacgaagcaaaatgccgcaagctggaggcgcaggtgttgagggacagccgagaggcgaaactttggcgcctcacgaactcaaacggagacctgaaggtgaagcaggagaaagaactagtcagtgctgccgggaagcttgcggagtgccagaagactattgctaaccttggccgccagctgaaatcgctaacagatcttgatggcgtggtggccgatcctgaaaagctggaatcgagggacacgcacctggacttcagagatggcggagacgtggctgatggactgtatgaactgggtcttcctaagaggaacggtagctgcctctcaccccttcggtcggatccgtcgccgaggggtttgccgtcccttagtagctacctgagcaaaacaaaaaggtgaaaagtctgatgggatcattcaccattgtgcttgtgcataaattatttgacagtctatggatgatgccagttgtgacctggtggtagatcggtgtacatttacagaacttgatggttgctcacatgtgtactttctccttttgttgtgctctcattttgcgagacaaaaaaaaaaaaaaaaaaaaaaaaaaaaaaaaaaaaggaaaaaaaagnanaaaaaannaaaaaaaaataaaaanaaannanaagaaaatanaanaaaatagtntaataaaaaanataantgnntggnatacnnatnntatantgnnnanngattntggtnnngntannntnnttnatatcntncnggggggggcngaacacanncnncncantatgtntnntntaatanatatacgcgtgggcggttntataaaatgnnnnnnngnnaaaatnnnnnnnnngnnnnanaatnagngtgtatanaanaaattatatatttnnaatntnnggtnaataaaaanataggncncantnttgtnttnacnataanattgntccnncnttatgnntgatntggannntntncncncntatatnnngnnaanaannggaananatgtgngnaaaaantgantattnanngacacagagcggananntgtgagcgcgttnatatatataaaataaaaanagtggntnnntgngtgtgnggtgnanacagtnaaaaaagtncncnnnnaaaaaanatannatattatacntgngtgagtgngnatnnnngtaanggcantnaatg

SEQ ID NO: 5390 - DNA, 1659 bp, Zea mays
  misc_feature (1650)..(1650): n is a, c, g, or t
ggtacccccgcgggccggccaaccaactcgactcatcgagttccacagctctcgcgtcgcgcgcagccaatccctctccctccggcctacacagcccagaactcccttctccatctctctctctcgtccgtgtcgccccctgtttgtgtacaaccccatggcgacccacgccggcgagaacggcagcgggcacgcgaacggcggcgggcacgcggagtggcggttcgcgcgggcggcgaaggagggcgcgctggccgtggcgggggacaagatgagcatccgggcggtgcggttcaagatcagcgcgagcctggacgcgcgcgacccgcggcccgtgctgccgctggcgcacggggacccctcggcgttcccggccttccgcaccgccgccgaggccgaggacgccgtggccgccgcgctccggaccggcaagttcaactgctaccccgccggcgtcggcctccccgaagcccgccgtgctctggcggagcacctgtcgagcgaccttccatacaagctgtcgagcgacgacatcttcgtcaccgccggaggcacgcaagccatcgaggtggtggtctcagtcctcgcgcagccgggcaccaacatactgctcccgaggccgggctatccgaactacgaggcgcgcgcagggctgcacaacctggaagtccgccggttcaatctgatccccgagagagggtgggagattgacatcgacggtctggagtcgatcgccgacaagaacaccaccgccatggtcatcataaaccccaacaacccttgcgggagtgtctacacccgtgagcatttggccaaggtcgcggaggtggcaaggaagcttggaatactggtcatcgctgatgaggtgtatggaaatctggtgtttggggacacccctttcgtccccatgggtgtctttggccacattgcccctgtgttgaccataggatcactgtccaagagatggatagtgcctgggtggcgacttggttgggtggccgtatgtgatcccaacaaggttctgcaagaaaccaagatcattgcatcgatcacaaacttccttaacgtttcaacagatccggcaacttttgttcagggagcgcttccccatattcttaagaacacaaaggaagattttttcaagaggatcattggtctgctagcggaaacatcagagatatgtttcagcggaataaaggacatcaagtgcatcacatgccctcacaagccagaaggttccatgtttgtcatggtgaaactaaatttgtatcttttggagagcatccatgatgatattgatttttgttgcaagctggcaaaagaagagtccgtgattttgtgtccagggagtgttttgggaatggaaaactggatccgtatcactttcgccattgattcatcttctcttcttgatggtcttgagaggctgaaatctttctgccaaaggcataagaagaagaatttgcttaatggccattaactatattcgacttcaaagttgttacccacttccatcgttttccactgtatcatcaacaaaagtgtaacattgaaatccctcagaagtaataaagttaatgtttacatatgaaaaaaaaaaaaaaaaaaaacagtgggggggccccggccccaattcccctatatagggtntttaaaaaa

SEQ ID NO: 5391 - DNA, 743 bp, Zea mays
cgatctcaaaggggcggcccccgaggccggccggggcgccggcgtctgtccataaaaccctaaaacctccggctgatcggttggtgttgaggcgagtggaagcttcgagttttttttttcttccttttggcttactgcgcaagaagaagggtaacaagaggacggcggcgatggcgaagaggctgctcccatctctgaaccgggtgctggttgagaagctggtgcagcccaagaagaccgccggcggcatcctcctcccggaaacatccaagcagctgaatgctgctaaagtggtggctgttggccctggtgagcgcgacaaggcaggcaatctgatcccagttgctctgaaggaaggtgacactgttctcctgccagagtatggtggaactgaagttaagcttgcagctgataaagagtacctcctcttcagagagcacgacattttgggcacacttgtggactaattcagagcatcagcaagcctgtcactagtcgttggttctagacttctagtgtgagatgcgtagtatcagattctgggatcaaaatccctaagaactctgaactgtcgtgatgtcatagattttgtgatgaaacatcataattgcctgcttcttgttgcaagcgaacttttgcgtttaaaatggttccctaatattgtgttcgccactcaaaacctggttgcaacgctctctagtttacgttggctggtgattggatttacaggatgtacttcttat

SEQ ID NO: 5392 - DNA, 2493 bp, Zea mays
gcacgagaccattacctagaacatcctaatcgaaaaactcagcacacacatcagatcgccacatctccgacaccaacccacctccctcctccccctctcgccgtcggccccgcccgtcagcctcggccgagtgcgtctgcctcgcactcccgcggcccctatagacagagcagccgctctagagcgggaggaaaggcgagcagaggagacagagatggggaagggaggaggagaagaggacggcgcggcggcggccgcgcgcgcggcggagcaggcgcgggagctgcaggacgcggcggctgcgctgctgacgcagacgcgggcggaggaggaggcgctgcgccgccgcgccgccgcgctgcagggggagctgcggcggctacgcgaggccgccgcggcgcacgcggacagcgacaaggttgaggaggacttggatcgagcagcgtgcctcatcgctgaaggtgacgttgcgtcgctgctcccgagcaagacgcaaggcgcttttctgaaaatgttcttgggaccagtaaatttgcgggcaacaaggaaggaggtgcagctcaaggtgaaggaggagtacaatagctacagggacagaactgccttgctgtttctttgttttccggtgattttgttgtttcttcgacaatggttatggaatggatgttttccagtattgccagttcagctataccaggcttggttattattcctgtataccagtttagctttgcgtgagaacatactgcgagttaatggaagtgatattcgtccttggtggatacttcatcactactgtgccatgctgatgtctcttgtaagtctcacatgggagataaaggggcaacctaattgtgcacgcaagcagagaggcgtggaacttttcctttgctgggccataatgcaaggatttgtcatgatgctgcagaatagatatcagcgtcaaagattatatactaggattgctttggggaaggctaaaagaatggatgttgtatggggagagactgctggtgttgaaggtcaattgttgctgttgtgccctctccttttcctcctgcagggattcgagggttatgttgggtttttacttctgcgcacagctcatactggcgttgtccctgagtggcaggttgtggtatgcgggatcctgctgatcgcgatggcaatcggtaactttgcaaacacagtggacaccctggtaaccaagtcccggttcaaggcgaagatgaagaaatccaagggcagacgggacctcgacacatgcccctcgccaacaggttcatcatcgccgatagattcagcgaccaccaaagcatgaacaaggccaagaggaaaaggtgcccgtgtttaacccgggtgtgttaccactgtaaagcattttagtgtttttttttcttggccgtcagctcgtaatcctgtccgtcgtctgtgtcgaagctcatactcgtgtaatcaatcatcaggcaagtaggctgctgatggttctaggctggaggtggccgagaataaacttgtggtgtttgtttatatacctgtaccctgaatgaacatcgagtgggctagggtggtgggcttaggactatgtaaggcttagcaaaattttccaagtatagttgtgagacaggcaggcatttgtcacaatgaatgaaacatgcgaagttgtatacacgttgtggcaatgtgttgctttgtatgttggttggtgcatgcttacgttgctctgaaataaaaaaaaaaaaaaaaattaaatgatggtgaagaaaaccagtagcaggttagaagatgcatggtactagcagcaggatgaggggtgacaatagggctagatgggtggatgccatggcagggaaggacgctgtggttgatcaccggctaacggctgacgagttagcatgggagaaagtttgggggataggataacatcacaaatacggcagctggaggaaggcaggtgtcacacccgaatttgccctttgccctgatttaagagtaaatctcatatgtgcgataattaaagattcgcacatacaatgacttacattcacatatacaatgactcaatacgctaattaaagattcacacattcaatgactaagaaatagataattcatcctcaatttaagttataacttgattagaggttgtttttagtcagagtataattatagaatcaaaatattacatcaattatatttagaaaagctaatcccataaccataggctatataaatatctacttataagaatatgtgttatcctatagataatgttgttactgcgtaataaatatatttatgaagtcaaatcggagttaaaacgtaggagttatgaatttcctaatgttctagaattatttttatattataaatgattatcaaccctatttacctatttcttttatctgtaaatggacgacggtgctgcagtgttttcacgtcgccggtgagcaaatcgccgcaccacggtcaccctcttagctcggctaacaa

SEQ ID NO: 5393 - DNA, 4358 bp, Zea mays
  misc_feature (3781)..(3781): n is a, c, g, or t
  misc_feature (4236)..(4236): n is a, c, g, or t
gcaccgcgcggccgcccggtctctctcgcccttctcccgtctccgctccgcctccgcgcgtccggcgagaccgcgagagcgagacgatgggaatgctacaaattccccttctgagtccgaccctcctcatccaatagtaccacctgctcgctgctccgccaccgctctcgctcgatcgcccccctcgttcgtcggccttcgcttccagacctccgagtcctcaatctgcagctttggtaattggtcgtatagtccctcatcatcggaatggtggggtcacttatctttcccacacctaatgtggatccgaaggcagagaatcctaatgagatggttacagctggtgtgctttcaagccttcagaatttcctacgcaagtgcctcatagccatcctctcatatggcccaatgccgaagcacattgcatttattatggatggcaatcgtcgatatgctaaattcagaagcatgcaagaaggagcgggtcacaggatgggtttctctacccttattgcaagtctgatgtactgctatgaaatgggtgtgaagtacatcactgtctacgcattcagcatcgacaattttaaaagggacccaagtgaggtggaatccttgatgcagttaatggaggaaaaaatcaacgaactcttagagaaccgaagtgtaatcaacaagattaactgtaagatcaacttttggggtaacttggacttgttatatgagccggtgcggttggcggctgagaagctgatggcgagcacagctgggaacacagggctggtcttttctatctgcatgccatacaactcgacttctgagattgtcaatgctgtcagtgaagtctgtgcggaaaggatggaaatgtttcagagtgaacatattggcgactgcaatggtcatgctgcaaataacggtgtgcgatcagagatttcagtggcggatttggatcgccacatgtatagtgccggatgcccagatcctgatatcgtcatccggacttcgggcgagactcgattgagcaatttcctcctttggcagacaacgtttagtcacttgcagaatccagatcctctgtggcccgagttctctttcaggcaccttgtttgggctatcttgcagtatcagagagtttaccctgctctggagcataacagaaagttggctaagaagcagttgtgattccatgttacttgcaaggaggtatcatgaagggctattaacatcaaacttttccttctcaatttcctggtaatggtaaatgcaaagaagaacatactagcatataacattatgaatagatcaccatgtaacttaagtgtgattgctaccgtaaccatgtaacttatttgagctcgtacaaatgctgtgattcctacatatatacaaaaaaaaaaaaaaaatggggtaacatggtgtgcgagagcatttctttgttttgcacgacaaagaccggatgcttcaaagcgcccatgtttgacaagtgaaaagaaaggagttcgaagtaaaacaataggccaatgtctgttttccatagtccaataagtagaccactgataatgtctgttgatcatattttgcatccagccaagtagaccactgaaaaccaaggtcatgcacgtacagaaatatatatgcaagtttaacgtctgatggctatctacttggctctggatacatcaaaggtccatttaaccaaacgctgcctgatcctgaggttagttaggggaccggcacgccaaaaaatcttatctgccacgagctaattactgagctccgccgccgtccgccggcacgacgagctgctccgggtcgaggtgcgggtacctgcgcagcacggctcgcttcatatcatccattcccttctcgtacccggccaacgcgtgctccgcgaaccggaccacctgctccgtggagccccggaagtcgcgcacggcagcctccctggcgcccctcaccccctccgcagccgccttcttcgcgccggcgagctcggccttggcctgcgacagctcccgccgcagcgcgtccgcctcgcgctcccttgccgcgagcttatcctcgagctccagcgcgtagcccagcgagaacgacgcgtagttcgcggcctgcgcggtgcgtcgcccacgaccagggcatgagagctagttggttagaacgagacacgcacgaacgaggcgtcacgtcactgtctagagcggaagcgaacctgtagcgctgtcgtgtagctcgaggcgatgacgtcggagggcttcgccaccgagaacgtctgctccagcgccggcgtgacgatgctctgtagcatccgccgcgcccgctcccagtcggaggtggcgccgccgtcaggctcacgggtaaccttcggtgacttgtgcgcggagaagaagcccggaggggaataatgcggtggctcggggcgcggcggatcctgtttcgtggcatcctccaccaccttcctctttttgcaggacgacggcgtatcgctgctgggctcagtcttcaccgtcactcccgacgcctgcgcggcctttgccgcccgcagattcttcatcatgtcgtagacgcaagggtccattcctgtcacgcatccacagcaatagcaccttaccttaccttaccttgttttacaaaccaagtgatgggagattgggagttccgggcgtgctcgagttacctttggcactagcactgcttgtagtaccaatcggcggcggcggcggcttcgctgatgaaccagcaatcgttgcagcagcaagattgctctcggaaagatacgtcatgatatcgactgccgcaccgtgaacacggagcagcttcttggccacgctctgctcctctctggtgagcgccggctcaacagtggagcccatggacagcccgccccacttcacggggcacggccacggcgtcggcgacttgaggaagaagaaggcctccttccacccagcaatggaaagcggcatccccttgaagagcaagccggcggcgtccttgccacggaagtagtaccaccccttgagcttgaacgcgcacagtgagaagaagtgccggaacacggggagagacggggccacgccggcggagtgggagaggacgacgaagccggccatggcgcgccacccgttgggcgcgatctggctcggcgcgacgccgaagtgggcgagcacctcgcagaagaagccgtgcagcgggacgcgcatgccggcctccagcgcgtgcgcgtacacggagacggcggacccggggggcgaacacgcgcgctggtggccggcggggaggaccgccgagtactgctccggtactccatacttcctgcagagggcgtcaatggacccttgggtttcgaaggacgatgcgaagcgctctgccactaaccccgagagcgcgccgccgctgctgccgtcctcgtccatgtcaccgacctcgatgatggggtcgtcacggagacgcgaggagtcgccaatgatgtagagggaggaagacgaggacgaagaagcagaaggcatcgcgcatcgttcgttgaggtgctgtgctggtgcacaacaacaatgtcagcaggattgtggaagagaggacaggattagggactgaaattgaagcggctaaaatctttaaatagcaatactttgtttagacgtagacattagagtatagaatcagggaactgaaattagctttccaaaatttctattgtttggttatacatgaaattaagatttggaatcagagaactaattccacggaattgtactataactagaaactctatatttcaatatagagnatcactcatctgtattgcgtggaattagaccacacaatttcaaacttcaattcattggcatctaaataatataattagaattacatctcatttgaatatcaaggctgatcctttaatatcgactttcaaacgaagcataagggaattttagcccctccattctatcatgtatatttgctactaaagaagctattgtcggtgttcggccgacgatggtagatatgtgcctcctaggattcctttctacacacatgtttggactcgatttgcaaaatgcctctttctgagttaagttagatggtctaaatagcactcctgatgttctaaatttaaatttcagtgaaagagaacagatttcaagtcagttctcgtagttatgtacacacgagatagaatggcctatgaaccggatcttcgtgtacaaattaggagggtcggttttcataacctttctngtttagagttccgattgaggtttttcataccgagggacgatctttccccgaccggcctagtttttttgtttaggatcgatttaatactagaaatcaaatactattcggtatggctccactca

SEQ ID NO: 5394 - DNA, 5972 bp, Zea mays
  misc_feature (2665)..(2665): n is a, c, g, or t
  misc_feature (5144)..(5144): n is a, c, g, or t
  misc_feature (5469)..(5469): n is a, c, g, or t
gcacgagaccattacctagaacatcctaatcgaaaaaatccaacccagtccacacgagacgaaacgagccgagcccatccctccgtcgccttcgccaaccctagcctagcctccttcttctcctcctcccgcggatccaacctccgcccgcccgcccgccgccgccgagagagccctatctcccccacgccgcggtctccgcgcaagcgggggcaggggacgcggatcccgcagctccccgccatctccggaacggccatggaggtggcggcggctgccgcagggaagccgctgacgccggaggaggaggcactccggcgcagcaccgactgcgtctacttcctcgcctcgccgctcacctgcaagaagggtaatgaatgcgattttcgtcacagtgagggtgctaggatgaaccctagggactgttggtactggttgaatggcagttgtttgaatcccaagtgtgcatttcgccatccgccaattgatggtctctttggtgccccaacttctggactacctccagtttctgcgcactacggtgcctataacttgggcaagcagatggtcccatgctattacttccagaaagggaactgcttgaagggtgatagatgccctttctatcatggaccacaaacagctagtaatgatcttgcagagcaagcggcgaaggtttcttcctttcctttggaaccgtcccaggctcaaaataacgaagaggctgtagctccaaataattcaacgcagcaagaggcccgaatgactgaaaacaggacttcgattcatgtttccaagagtggtgtgggtgcaactcccgctgatgtagcttccaatgcattgaagcctgggaccaacttcgagcaggcacccagtaatacgcttgcagcaaagaaaagttccacaactgaggatcatcctatgcactatcagaaccaggttcctgtggagatcgatcctgtcaaagactggaaccaaaattttgaagtgtctcctactgattacctgccacaggatagtagggaggctgatgatattttgggggagtcctctcctggttttgatgttcttgtagacaatgatgtagatgttgctgaagattttgcaagggatatgtacccggtagaagattacgagtatgttacatctgattttgatgctcgggcccatcatgaaagtgagcagttcaacgatggaatgggtgtgaatggacggattggacagtatgatggctatgagaggaaacgccgtagatcttcatctgagaggaacctagacagacattaccatccagatggaaggtttcttcacagagagcttgatcgtggcgagatagatggatcagatctacgccatcagctccgcaggagaagaataaatgggccctcaacaaccattagcccagaacgggctaatggggaccgacatgggagggatgaaccctacagagaaagggcacatggtggtcaccacacgtacagagatcgctatcagggcccacgaggaagcaatctaagttcccgtctgcaggccagaataaagcttcctcgaagatcacctgatagagttgatactcgcttcgaggatgagcgagacaggagaagattcagggataggttttctccaatgaggcgtatggatttccatggtggtaggcatcaagaggctggacataatcaagaaaggggccacaggaagttaagcgagcttgtctctactgtcaggcatgcagatggcctctctgctagaagagatgcagtgggttcaactcattttgctgctcgcagaaacttgggagagccaaggaaggcaaatggtcttgtggaatccgaagcatctcttgattttgagggcccaaaaccccttagtgtcatcttacagagaaaaagggaggcagcacagggcaataactatgagaaatttgctgaggttgcagtcacgcagacaggttctctggatgaaactgagaagaaaagctgtgacaacgttaccaggtttgcagattgcaagagtggttcaggtgacgaagagtataaagagcaagatcatatccttgtggatgcacacaggcagtcttcggatcatggtgataagtttgaggctgggtatgctgctgaagtggatgcagaaggaaaacaagaggcagatgactatgaccagagagagggcgagtccgacgactacgagacatttgaaggccatgactacaaatctgaagatgaaaatgtgtaccaagacgacgaggatttcgatgataatgatgactttgctcggaaagtaggggttttattgccttagacgccgcggtgtcattggttctgttgcttgaggcaacgagctctagtttttgccatcggttctgttgcttgaggcaaagctgaaatgccgatcataatcgatttgaggtttacatgtaaactgctgtgtgatgttcagcacatctgacctctcctcggactttgttgtattagtttccgtactaacagcaggatatattccttaatcaatttgtgcccggaatgaaatataatcaactccacaatgggggggcgttttgcttaaaaaaaaaaaaaaaaacgcgggcccggtatgcatgtattttggccttatgctttgagataccatggttgttgttgcctagtcgtgtgggtttgctgcaaaatcnaagtgatatatatgtgtttatggtacttgttgaaaatgaaatcgtgtgctggagttggatacaggtgaatgcaacaggagctcaagagatgcctccccagtgcaacgtgatctgggttgctgacgaccgaaaacaaaattacaatattgattgctgacgagtgaaattattgcactgaacactgtaaattcatcgttcagttaccaatgaaaatattctcagaaaaatgaagagaaaacaagacggtatgcatgttttcttttttttttcttttggcgtggaagcgttccgttggttagggttagttattatgtatgtatgtatgtgagatgagttggacaaatgaagtttgtgtagaaaacttgtttattagactgacagtgtaccgctcaagggtctcttcgtctatcactgtagaaaatgttgttgtcctctggaatctctccttgtacgtccaactaaacacacccttaattcgatggaatcgatccaaaaggcttgtccctgaccatattagagatgataatggatcacgatctaaatatttatcctcaaaatggtagggtaataaataaattttagtttaaaaataaataaaaatagaacatgatcatatccttaaatcttatagcgtaaaatttagatctcgtataaagaccagttcatggccgccacgctacgttgtcagtcctgactcctgagtgcgaggcggttagtattggtttaggtcgacggcaggtaaagcagctgggcacgtaggaccccgatgggaaaaccggaaaaagggtcaccaaaaacacaagaagacgccggccgctttccggtcacgccaatgtcatcatacggcacttactagctactaggctaggtagtagctactaagccatgattgataaccactcagcaactggcgtgcgaatgcgcaatgcgacgcaacgcaacgcaacgcctctgcctctcctctagtctggttcggccgccgtgcatgtgcatcctgctgttgtgctctgtcctttaaattcacgcaggccaatcatgtggcaagttgctagacgccaatggcctatttgctatcgcctatatatcgttgtatagaatagaaatgcatgggtcgtcggagtactcctagctggctggaacatgcatgcacatcctggctctttggctagctatctatcgctgtgactgtgaagatactactcactctgatacacgtgctagctgacagtgatgcatgagatattattattcagatggaccatgctacgtgctgctagccgcctgagagcaacagggacggcaagctatagatagggcggcacgatggatggggatgcattttgcatggtgcacgcatatggtccagacggatcatgcatgtctcactctcacagtcaactagagagagaaatacatgattttttttaaagaaagttttgaacacagcacctcttcctcaaataaaatcctttttgaagttgagcaaagtttgtatccaaacacgtcacgggtcctcgcccgctgctagtggcagtaccctgtatccctcatgtgtgcatatcaacagtagtgaccgtgcaaagagaagtagcaaccggccggttggtttgggagtggtggcctcgatcgactcttcttaaaagggtctcggatcggtctaatcatgtagagcaggttctttggtaaaaactcaaaccgttttaaagaaatatttgacaaaaaaaaacagttctaatgctagttttattattgtagtctatgtcaagttcccgagaaaggaccagaaaaaagacatgcctttacccaccaattctataaaaggcgaggaaatctgcatagtggacgcctggaccgacgcggacgccgccggctcgcctttgcgaaaaagcccaaaaggattctctgcctctacgatgaatctcatcgggagcacaaaaatctgtatccaaatcctaaagagctcgcttttatagcgaaaagttttctttttttttctttttacaaatccacaactcgtaaaaggttgtgcagatcacacagaagcatgcttagattttgggactttgttcaaattgggaaggaaaaaaaaagttacgcgtagatttatgtaaaagcaactaaagaagatttatcgcgtacgtatgaggtcctaattactgacatgaaatgagatgttcacaatcacatgcgagggttgggttccggtggggagggagatcgaaatcccggcggcacgcggcgaggtgggcaacactaaaatacgaggtacagtactagcttttggttgtttgtgttattaagcttctgcactaaaacgacacgggctatctctctcgcgtcaaataaacaactgctacgtggcggagttagaggcgtgtttgatttctaaggactaaaatttagtatctccattttattacgttttaatccttaaatttaacaaacctgtatttatagaataaaatagagaactaaaaantagttcttataaaccaaacaaacccctcacagttagcctgtactgacagataagtatcgtctaatatgtcaggtcgtctgaagaactagatcgagcgcgggcccaaggaacctaataattggatgccttttggggtcctccatcaaacaaagggggataggatggtcacaggttccgagatctttttcgtgagcgccgtggcgtagtacgtggaattcgctcgccgccgagctagctttctataattactccattttggtaatggggcttaattatgatttgtacaatcgcaatctactttttcaaagaacgtttggttccttancgccgctgctgctggtgcacctcccctcgctcgctccaagatatgttgtgggtgcctagcgggtggccggcctagctctacgatgaccatcacgatcgagttcacaaaccggtgaacatttgttattggtatgtgctatttagccaaggaaaaatcacggtgtctttataattacgtaaaaaaaatacaagctaagcacgatgtttggtaacaatcacaagaaaaaatcacaaggcgcagctctagaaaatcaggaaaaaaaaacagagaatttgcttactatgaacaaattaatatagacttttatcttccacactctctcaacctgaacgcagagatgtcaggttgagattgcgcgctgaaattggtgaatggaagagccgagagagtgacttgttcagtgcattggcaggttgaaattgttgattggagcgcctgaaatcgtttggcccatagaagagttaatttcttgctgtaagtttcggacgaccaccgaaacgacg

SEQ ID NO: 5395 - DNA, 1421 bp, Zea mays
atgttttttttttccaggaacatcccttccagcaacttttataccttcagcagagcaatagcactcacgagtcacgacacagttgctagcacaaaagatgcaacttccagcagaggtcaacaaataagtcactagagctcaccggtggtgctgcaatagaatcagctacacacaactagctcaaccaatgtacaaaagaactgaatacctaaattgccaaaatcacaaatctggactcctaaactagatagctataaaagctactggaagagttcaatatggatctaagctatatcagtaagcacaaagcccttccacactgaattgctaagctgtacataggagatagagcaccgctgcttcaccgccgcgacaatctgggtcagaacctcaaactgtatttgttcttttcccagtaagaatacgggatatctggaggcccctgctaaaaccttcattgaaaagtacccttgtctgcatttcttgaaatcccggcaaccaggacagcaatgcaactggtgccataatgaacactccaagcagtatctcatacaaacgagccacagaaataatactgtcccagaccacagtggattcgatgaatggccgaattacttgagcgatcgaaatcaagccccaaccagtaggaataaatgccaaaagactagtgaagatgtcaatgatttgaaattccgtgaacttcagaaacaaaaccagcactagcactacaagagtgatgacagcagtttgaacaacccggtagtaaaggtgctgctttgcggcatacttgtctcgagcataggacattagcacgaacagaccaaaaatcacagccacacatatccaggaaagcagatagacagcaatacttctgctattgtttgctatcttcagctggtatacaaccccatactggaaaaagaagtacctgagatctaacagtatctccaaaatctttccccaaagaccagtggtccgtagatgatcttgctcttcataccaccacacttcccagctctgctcaggcttagaaaagagaccaccaggataccatatccagttcatgaaatcatcaaaatcgtacactgttttcaaccaatcaaaaccagacggattaaaagcaaatggagccataatccatgataccaccagaaaccagctagatatattcataattatgtaaacaagtgtattcttggcaataacactgtgtgcagcatacacagtcaatattattccaagctctattgcctttatgaagtggctcctagcatacagcctgtaattttcagcaaaactcttgtgctgcacaacaaaaccacggccagtagcacggtattttgcaccaccatgaaggattgtccggccatagtaatggctcttgttcccatgaaaatggtagaacacagataaaattcccg

SEQ ID NO: 5396 - DNA, 1417 bp, Zea mays
  misc_feature (3)..(3): n is a, c, g, or t
ccncccgccgggagttgtcacgccccaaagaccggcaccccgccgggtccgaggggcatcgcggcatcggcatcgccacaaagcccatctcacagccccgcagcctcttctcctcgtccatctcttccgcctccctccccgcgccgccgttcgccgaagccccgcgtcgcgtcgcgtagagtgcttgatggctgccgcaaggggcattaaccagcttctgaagagaattctccacaaccagtccgctggtccatggctgctttcttcatttcggggaaatcatgaagagtcctctgctggattgagagcattggcgcttcttggagttggtgcctccggtcttttgagttttgctacaatagcatctgctgatgaagctgagcacggtttggcagccccagattatccatggccacatgctggcatcatgagctcttatgatcatgcatcaattcgccgagggcatcaagtttacacacaagtttgtgcttcttgtcactccatgtccttgatttcataccgtgatttggttggggtggcctatactgaggaggaaacaaaggcaatggctgctgagattgaggtcgttgatggtcctaatgatgagggtgaaatgttcacccgccctggtaaactcagcgatcgctttccacagccttatgcaaatgagcaagcagcccgatttgctaatggtggcgcctacccgccggaccttagtcttatcacaaaggcaaggcacaatggtcagaactatgttttcgctcttcttactggataccgtgatccacctgctggtgttcagattcgtgagggtctgcactacaacccctacttccctggtggtgccatagccatgcccaagatgctcaatgatggagctgttgagtatgaggatggtactcctgcaactgaagcccagatgggtaaggatgttgtatcattcctttcatgggcagctgagcctgagatggaagagagaaagctgatgggagtgaaatggatctttctactatcactagcgcttcttcaagctgcatactaccgccgcatgaggtggtcagtcttgaagtcccgtaagctggtcctggatgttgtcaactgaggactaccattacccttttttatatttaaatatgagctgttaaggagtattcaaaataatgaatttgtgatgtacaattttgccactgggggctaggttccatgcctagagattattttgttttctttactctgctgagctgcaaaagcatttcaccaacgggtacatttcacgttttttttggtttgcaatgcctcgatgttatcagcaaccttgtaacttaacagctgatgagagttgataaattcttgtgctatgaaatacacctatcgtatgtcttggtctaaacaagagactatttctctctcctcgtgc

SEQ ID NO: 5397 - DNA, 769 bp, Zea mays
ccggccggctacctcgccacgtctttcgccgggttcttgcccgaattccccagggtccacttcgctcgcaaccttccccagccatggcgaccgcgacgcggaggctgctccccgcgctcctcaagaccctagctccagccggcgcgcgcggcctctccaccgagaaggctgttggtgcagccgccgtcgtcggcagccacaccgctaagtggatgcaggacacgagcaagaagtcgccaatggaactgatcaacgaggtacctccgatcaaggttgatggtcgcattgccgtctgtgaaggggcttctgaaggtgttggacttggccacccaatcgagtacatctgccttgatctggaggcacctaatgtgtgcaagtactgtggtctccgttatgttcaagttcaccatcactaaattgggaagatactgccgtctaccgctgcagaagctgagttgaggagtttatgtgcacacacatttgttccacaatgttctgtagtgtactttgtactatgcttgcgggcaaaatattacctttgatgatcatcctcttctcgggcgatcttttattaatcctgtcttagtatggttcatttttctacagatgaattgtgctcctttttcagaatctatacaagctgtgtgtattgaagttttactctgaataagcatggaactaactctgagggcaatttaatctcagaagttctagttttctggagaaaaaaaaaaaaaaagttgcccaatcccggcgccagctttttgtt

SEQ ID NO: 5398 - DNA, 1155 bp, Zea mays
aggaaaaattttatcacaactatatctacaaatcaaacacacatctaaaccagttaaccacaaaaactttggtagcgtggtcgcgccagggccggccggggacttgtgcgccatcacacacaagacacaaccccactcacccggcagggaggccctcttcgtcggcggaggccatggtttccctcaagccgcagaagaggctcgccgcgggagtcctaaaatgtggcaaggggaaggtgtggcttgaccccaacgaggtctacgagatctcgatggctaactcgcgtcagaacattcgtaagctggtgaaggatggattcataattaagaagccacagaaaatccactcaaggtcccgggcaaggagggcccatgaggccaagcagaaggggaggcactctggttacggtaagcgcaggggtaccagggaggctaggctccccaccaagatcctttggatgcgcaggatgcgtgtcctcaggcgtctgctgcgcaagtatcgtgaagcaaagaaaatcgacaaacacatgtaccacgatatgtatatgaaagtaaaaggaaacatgtttaaaaataagagggtactcatggagagcatccacaagtcaaaggccgagaaggccagagagaagactctctcggatcagtttgaggccaagcgagccaagagcaaggcttcccgtgagagaaagattgcaaggagggaggagagattggctcagggcccaagggaacctgcggcagcaccagtatcagctactgctccgtttgcagctgcaccaaagaaggcgaagaagtgaaaaaggtggtcttctagttctaggacctaattttggagcgccccaactcttttgctgttacatatccaagctgtcagatatctgtaataacatcttatctcgtttttcatgttggacaatgtagtaaagttgtttgtcccaagtgtatttggaacgaattttcacagaatctgcttaatgcttcggtggaacccagttctggttttgctattttaccttgtagatctggccgctgtggctagcctccgtgcttttttgcttcgatgttccataaccttgtctggtgttgacccgcgatgacgcaggttttgtagtgttctttggtgaattatgagctctgatgtgatattgataa

SEQ ID NO: 5399 - DNA, 2593 bp, Zea mays
tctctcataattcctctccggttcccccgcgtgatctgtctcgtgcggcaaggcgtacgcgtcctctcccgcccccgccaggccggccgccgccgtcgccctaagccaggtgcccaggtattcgtcggtcccttcgccaggcctccctcgcttgccgccaacgagcacccactagactgtagactacaattgcatcctgaagaataaaatggaccaacatgattccatggctgactcaccaaggaggcggcacaaccttttgcgtgacaaggtccaattggtgaaaaggaaggattcagatcgctatgagatcgtccgcttccatgatccactgtcttttgagaaaggcttctttgttgtgatccgtgcttgccagcttttggcacagcacaatgacgggataatatttgttggtgttgctggcccctctggtgctgggaagactgtgttcactgagaaggtggtcaatttcatgcctgatgttgctgtgatatcaatggacaactataatgacgcaactcgcatagtcgatggcaattttgatgatccacgtctgacagactatgacacactgctggaaaatatacatggtctgaaggaaggaaggtcagttcaggttccaatatatgatttcaagtcaagctgccggactggttatagaacagttgatgtccctagctcccgaattgttatcattgaaggtatttatgcactgagtgagaagttacggccagtgatagacttgcgtgtttctgtccactgggtggtgttcattttgacctagtcaagagggttttaagggatatacagcgagctggccaggagcctgaagaaataattcatcagatctctgaaacggtttatccaatgtacaaggctttcatcgaaccaggtttggagaccgcacatattaagatcatcaacaagttcaacccattttcagggttccaaaatcctatgtacattctaaagtcaccaaggtctctagggacctgagaaaatcaaggctgtgcttggtgatgatcatacggaaagcaacgaagaaacttatgatatatatctgcttccacctggtgaagacccagaagcatgccaatcttacttgagaatgcggaatagggaagggaaatataatctaatgtttgaggaatgggtgaccgacaattcttttatcatatcaccaaggatcacttttgaagtcagtgttcgtcttcttggtggtttgatggcattgggatatactatagcagctatactgaagagaagcactcgtgttttttctgatggcaaggcaactgttaaaattgattggctggaacaacttaacagacaatatatacaagtgcaaggaagagatcggctttatgttaaatctgtagcggatcagttaggtttggatggttcttacataccacgcacatatattgaacaaattcagctggagaaattgattaatgatgttatggcgttaccagaagatttgaagacaaagctcagcatcgacgatgagctggtctcaagtccaaaggaagcctttttcccgtgtttcggctgatcggagaaacaaacttatgaagagtgcacgagaccattacctagaacatcctaatcgaaaaaatattgtgaaattgagtaaactaacagaaaccaataggaggtttggtggagggcgggcccttgaaccgcctgctatcaaccagggtgcaatcacccagctttcagaacagatatcaacattgaatgaaaggatggatgagtttacctctcgagttgaagaactcaactcgaaatttacagtgaaaaaacatttgcccagtcagcagaacttagctcttccaaatgatgcttgcaatggttccacgcctacaaatctctttgtctctcatttaggcaatggtactctgatacctcattcttcatcatcaaaccaactttcaaaggattccccgatgatagaagagattatgaacataacaagaggtcagcgccaggttatacatcagctcgacaatctgacaaatctgcttcacgagcatttggtcttaacacgccagactaataataccgccagcaggaaccgggtgctggatagcgacacactcatctgtccacttatttgcctgactgttgccagtatcggttacttcatgtttaaaggtctcagtaggggctgaccaaagtgagttggcccaaacatgtgctccgaggctcaccaccaagttttggcagaactggagctaaaggaagacagttctcgcaccgtttacatcaggaagatcatatctaacagcttacggtcttattaagacaggtaaacccatataccagcacatggaacaaagctttcgcttttcagggagttattactcccaaacgcagaaaatggtgtaccagaagcatacacttctgtaacaggcactggcagttcccagtgccaataaattttggaggttaaaataatgctcagataatgtcgaagaaattatgagagatctataagtttaactgaacattgtcgttgtcggaaaaaaaaaaaaaaaaattgtctgtgtcgtgatttctgagtgcgagcactatctcatgatgccatctg

SEQ ID NO: 5400 - DNA, 991 bp, Zea mays
cccccctcccgttcccactgtcttgcgtggaaccagctgcgtgggcccccccgcaaggtcgaagcgtcgtctctctcggcacggagcctagtgcccggcctcgtgagatccgaaattcagaatcgaggatggcgacgaccgcgactaggcggtggtggaggcggcacgacggcggcgacgatgacccagacgacctcgtccccatggacacccaagagcaagaagagctggtccggtctctggaggctaagcaggcgcagcaaggccgccgttggaggcgcgtcttcgcggggttcctcctaggttacgcggccttccttgtctactccagtttccatcatgcttggtctccctgggagctgcggtaccatgcttacttcatggaagatttgcctgcaccaatggtcataattgcagattggatagctgctctagcatgcctatttgctgtgaaaggattactacagaattcaggcccatcaaagaagtggatgtggtattcttgctatgttggcattttggtagccatcttttggacatactacatcttgaggttgccaagaattcgatgggatgttgcatggctcccactcggtcctttgatggctggtgcattgagcctgtatgtggaccatgtgctgctggagtcaatgcaagatatcagcacattgagaagttacatgtataacttcaaggccttgtagttttgagcataatttcccttgcacctatatgcagctatatgtggaacaggttcaggtcatttctccttttttttagtggcagagttgcggtggtaccttgttaaatggtgtgttagcatgaatttttaacctcagagaatacttgtgcatcacttccgctctgtggcgggtgtatgtacaagctgtggtgccaataggcaccgcggctgtttgaaacacccccctgcttcagtgcttctactgatgtccatatttgttgtagaaattgatgatttttgagaggctta

SEQ ID NO: 5401 - DNA, 2401 bp, Zea mays
attttttttatatggagattatttctggtttatataaaaggacacaagtggggacgaagcagcagaagacttcccttcgtctgcttcccagagacccagccatggcgatctcccagatctcacgcatattcctggccatccttctcctggccgccgccttcgccgccgccccagctgcgcttgcggacggcgacgacgtggtggcccttaccgaatccacgttcgagaaggaggtcggaaaggaccgcggcgccctcgtcgagttctacgccccctggtgtggtcactgcaagaagcttgctcctgagtatgaaagacttggtgcaagttttaagaaagctaaatctgtcttgattgctaaggttgattgtgatgagcacaagagtttgtgcagcaagtatggagtttccgggtatccaacaatccaatggttcccgaaaggatccttggagcccaaaaagtatgaaggacaacgcactgcagaagcccttgctgaatttctcaatactgaaggaggcacaaatgtaaagctggcaaccattccttcaagtgttgtggttctcaccccagagacctttgactcaattgtccttgatgaaaccaaagatgtccttgttgagttctatgccccatggtgtggtcactgcaagagtcttgcaccgacgtatgagaaggtggcttctgttttcaagttggatgaaggagttgttattgctaaccttgacgctgacaaacacagggatttggctgagaagtatggagttagtggatttcctaccttgaagtttttcccaaagggaaacaaagctggtgaagattatgatggtgatagggacttggttgactttgtcaagttcattaacgagaagagtggtaccagccgtgacacaaagggtcaactaacctcagaggctggccgtatagcaagtctggatgtcctggctaaggagttccttggtgcttccggtgacaagcgaaaggaagtcctctccagtatggaggaggaggcagataagctcagtggttctgctgcaaggcatggaaaggtctatgtaaccatcgcaaagaagattctagagaaaggcaacgagtatactgagaaggaaaccaagaggcttgatcgcatcttggagaagtccatcagcccctccaaggccgacgagtttatcatcaagaagaacgttctttcgactttctcatcctaaggcatctgctagctccattttcacgtttcagatataggcgacaaaaactgcaggattataagtgtgataatgagagttaaatggtgctagaactaattttggggctttccctcgaggatatgtaatactcgtacgtcttgcgaattagttcttttccttgtgcttctggatttattccgtagcaccatagtttattttttggtttgacatggaggacattgtgactacagaactgagttttactatccaataacactgctcacttgatggggcttatgcgaaaaaaaaaaaaaaaaaaacaaacaaaaaaaaaaaaaaaaaaaaaaaaaaaaaaaaaagcggccaaaaaaaaaaaaaaaaaaaaaaaaaaaaaaaaaaaaaaaaaaaaaaaaaggggccccgccaaaaaaaaaaaacaaaaaaagggggagggcgtggcaactgacaaccccttgttggcgccccgacaaaatcgtttattgtccgcgttccccctccctgaaaggggggggaaaacgcccggccttccccccttttgtcccctgaagaaccgcccccctcccccatcgccaatggaaaacaaaacaaccctgccccctccaccgcgtcacaagagggggcccccccaaaagggaccgtgaaccccgcccgaccccgaattatgaccccggggggttgcgtttcttcacctccccctccccccccctttttttcccccccccaccccccccttcctctccttttttctccgtttccttccccccggtttgccggattttccccccctaaaaaacagattaaggggccctttcccccaaagagtttaattgatgtgggctccccccccccccccaaaatatttgttgatggaggtgtttaccacagggtcccctcctccaaaaaaggaatttatcttccctctctttgtgcagaaatagaaccttatttaaagcggtatttttgccaaaattgggacaaaaaaccaaaaaatttttctggattttttttttattttttaataaaagatgtttttcgccattacctcaccttttaaaaaaaaaaaattgcccttttttttcacaaaatttttatccgaaaaatctttatttttttgattaatccttttaaaaattgggggggatcaatttttttttttaggaaaaaaaaaaaaccacacctttttttttttttttttt

SEQ ID NO: 5402 - DNA, 2275 bp, Zea mays
cggccgggccgggtccctcgctgccggccgggccgggagctcccatcccagatcaggattagccgaccacccgccgaaggccagagagaaatatctcatcttctctccaccggatcggttcaatcgagagcgagggagaaagggaggtggtgcgtcgaggggggccgagattttgccggtttggagccagataggggtatgagctgcttcgcgcaccgccgccgctccgacgtcgcccgccgccaggacggcctcctcgtcttcgtcttcttcctctcgattcccatacgtaccagtagttttaatttaagtagtagtaattgtagtagcaatctcttgtaaactgcgctcgcctttgcgtgttcgtggtccttttgcgctttctcgtccctctttctctcaatctctccttattcttctccttccacggcgaagccggcggctggtatggatcccaatggcctcaaaactggaggccttttgctcccgaccatcgagaggcggtgcacgtcgcctccatccgtcattgtcatcggcggtggcatctcgggcgttgcagctgcccgtgccctctccaattcttcatttaaggtgactgttttggaatcgagagatcgtattggcgggcgcattcatactgataactcgtttggatgcccaattgatatgggagcctcatggctacacggcgtgtgcaatgagaatccactggcaccattgataagctatcttgggctgaggttataccgcacaagcgatgataactcagttctgtatgatcatgatttagaaagctatgctctctttgataaggatggtaatcaggtcccaaaggagacagtcgataaagttggagaaacattcgagagaattcttgaagagacggtgaaagtgcgcgatgagcaggaacacgacatgccactgctacaggcaatttctattgtgtttgagaggcacccccatctaaagcttgaagggctagatgatcaggtcttacaatggtgtgtctgccggcttgaggcatggtttgctgcagatgcagatgaaatatctctgaagaactgggatcaggagcgtgttcttactggtggacatggactgatggtaaatgggtactatcctgttattgaagctcttgctcaaggtcttgacatcaggcttaaccaaagggtcaccgaaattacccgccagcacaatggagtcaaggtcactactgaagatggcacaagctacttggccgacgcctgcataatctcagtgccactcggcgtgctcaaggcgaacgtaataaagttcgagcctgagctgccccagtggaagagctccgccatcgccgacctcggcgtgggcaccgagaacaagatcgccatgcacttcgacagggtcttttggcccaacgtcgaggtgctgggaatggtcgggccgacgcccaaagcctgtgggtacttcctgaacctgcacaaagccaccggcaatccggtcctcgtgtacatggccgccggaaggttcgcccaggaggtggagaagctgtcggacaaggaagccgtcggcctggtcgtttctcacctgaagaagatgctcccggatgccactgaaccgacgcagtacctggtgtcgcgatggggctccgaccccaactccctggggtcctactcgtgcgacctggtcgcgaagccggccgacgtgtgcgcgaggttcgccgcccccgtcgagaacctgcacttcgccggcgaggcggccagtgccgagcactcggggtccgtgcacggcgcctactcgtcgggcatcgccgctgccgaggaatgcaggaagcggctcctggcgctgaagggcatcccggacctggtccaggtcgcggcgtgggaggagatggccggagctgtggctcctctgcagatttgcaggacctgagtgagattggatcactggctgcctttggacattggagtggatcgtggatcgcttcgctgctccctgatggttgccgagtctttttttatatttaccttaccttgaaggccgttgtgtcttgtctggaataaatcaagattgactggcactgaaagtgtcatcgcgtcactctttcatacttattaataaatatcacaagtctgtcctgagatctcagcctggtgcctgcgtgctgcctttgccttgtatatgacgttttactttcttttagtctcaattattcaattttttttttcacaaaaaaaaaaaaaaaaaaaaaaaaaaaaaaaaaaaaaaaaaaaaactcgagggagggcgccggtac

SEQ ID NO: 5403 - DNA, 1232 bp, Zea mays
  misc_feature (1228)..(1228): n is a, c, g, or t
cccccccccaagctatagctagccagccatcctactgtcacacacacacacacacacagacaagtggtttccaaagccaagtgtgtgtactagcaaccagctagctcgggcggcagcaggcagccatcatgtcggaggagaagcaccaccacttcttcaaccaccacaagaaggacgaggagcagcccgccggcgagtacgggtactccgagaccgaggtggtcaccgccaccggccgagggcgagtacgagaggtacaagaaggaggagaaggagcacaagcacaagcagcacctcggcgaggccggcgccatcgccgccggcgccttcgcactcgtacgttcacaatgcatcacatccacaacggcgagggcgagtacgagaggtacaagaaggaggagaaggagcacaagcacaagcagcacctcggcgaggccggcgccatcgccgccggcgccttcgcactctacgagaagcacgaggcgaagaaggaccccgagcacgcgcacaggcacaagatcacggaggaggtcgctgccgcggcggccgtcggcgccggcggctacgtattccacgagcaccacgagaagaagaaggaccacaaggacgccgaggaggccagcggcgagaagaagcaccaccacctcttcggctgaccgtagtaccggccggcgcgcgaccgagctagctagctccggcgcacacaaccacacacctgtttaattctgtactgcatgcgtgtgtaatttgatggttcacaataatgagtccctctccggaccttggtagctgcttgcttgtggtgagtgagagtgtgagactgagggagaagaggtggtgggcgtggggctacgtcgagagaggcgtgttcctgtaatcctgtactcgcttcgttttctctgcatgcgtctataattgtgttcaataataagtgagagcggtgtgatgtgtggctccccttgtcaggcctcatgtttatccgtattgaatcctggcaccatgcatgactgaggatctggatgtctatgaagcaccgtgtatctatcatcacttttgcaaaaaaaaatattcttatatttcttgaaaaaaaaaaaaaaaaaaaaaaaagccagttctccgcgttctttccactgcttactaagatattgtttggttcatatatttgtaacacgattgataactaataatattaaactatgtttgtttaaattcaactgtaatcatatancgcg

SEQ ID NO: 5404 - DNA, 1892 bp, Zea mays
cctcgaggccggccaccctttttcgtctctcctctgcctttccccatcgtctctccgtctacacctcatcataatcacagattcacagagcgctagggaggagagagggctagggtttcgtgctccctcacgcaacgaatccgagccggatcggggggtgcgcggagtcaccggcggcccggcgttgcctgggctgtgatacagttgcaatggcatctgtaactgatgagacagctaagattgagggtttgacatctgctgcagcctttgtggagggtggcattcaggacgcatgtgatgatgcatgcagcatttgccttgaggctttctgtgagagtgacccttctgcattgactggctgcaaacatgagttccatctccaatgcattcttgaatggtgccagagaagttcacagtgcccaatgtgttggcagcctattactatgaaggatcctaccagtcaggagctgcttgaggcagtagagcgtgagaggaatataagaactaatcaaactcggaacacaactatatttcatcatcctgctcttggggattttgagctgcagcatctgcctgttggtaatgatgctgagcttgaagagcgtatactgcagcatctagctgctgctgctgcaatgggaagggcacaccatcttggaagaagggaggggcacaggggacgatctggctctcatggtcgtccacatttcctagttttctctacacaaccaaattcaccttctgctggcacaatctcttcatcttctgctcatatggagggagaaaatgattcaaatcctgccacacctagagctagcgagtcatctccacgagctattcgcattggagaagtgggaaaccaaagtcctgggatgcttacctacgatgctgaacaggatgctgtcgtttcttccggaaatagcactcctgtatcgagtcctaggttttttaacaggagacactccactggacagtcaactccagacagggctgggccatcggatattcagtctttctcagactccctgaagtcccgcttaaatgccgtctctatgaagtacaaagaatctattacaaagagtactcgagggtggaaggagagattgttttcacgtaattcatccgtggcggatcttggttctgaagtgagaagagaagttaatgctggaattgcgtccgtatcacggatgatggagcgtctggaaactagaggaaatagcagaacaagtgatagcccggcagcatccacttctgaagttccccctgctacagaatcaagcaatgaaagggttacagagagcaactctgctgctgctgctgctggtggtggtactaccactacgggtaccagcgctagcaacgcctccgccccttgtgttgcgacatccggttcaaattaggacatgtaagggtctcagaaagaaggcttacacctgcaattcttcatcttcaaaggtttgtgagcctggcggcagagcagaagtgcagtaacatgatgccgtcatttttttctcaaccactgcataaacggctgcaaggggaaaaaaaccaaacggtgatttgatgtattggctcgataaaatggtggtgcgtgtggcctaggagaagtcggatttcatcttctgttttcgtctctttgtaaaaaaaatcgtctgagggcagatgtttaccggtataaataacggatatgtcatcttcatagtacgtggatcagttataaatatgattggaacagcaaagcttgctgctgttataaagttgtaccgtggcacgatttcctgttctgttctgtgtgggtgaattgatggattttgctgtacacaagatatgcatctttccaggtctcatgcctatgtatacatatacatattacacgaacctaccttgaatcc

SEQ ID NO: 5405 - DNA, 1449 bp, Zea mays
  misc_feature (1433)..(1433): n is a, c, g, or t
atcagctgttccttactgggccgctcggcccgtattccctgctcgttcagtcgtcctcttcctccaaacctttccgctgccggtgaacttcctccacctgaagcccctaccacgataagccctaatcccagcgccacctcgatggcgaccacctctttctttcatccgctcgccgccccgatggaccgcggtagccgtttgttttcgtcgctgcccgttcagcctaaccatccccgcccgtacagcgccccggcgaccggcgccgcttctcgtcgtccgcgctaagcgcgccggcagccagccccctgctgccgccgcctcgcgtcagcccgcgaatcccagcgcggtcccgaagcgggacgtggaagaagaggaggaggaggtcgaggaggagatgccctggatccaggacaaggcgctggacctcgtggagttcactggcaccgtcacacaggccatcccagggccccgtgtcggctctagccctgttccatggcttctcgcggttcccctcgcctacgtcggggtctcctttgtgctcgcggtcgtccgcaccgtgcgcaggttcacctcgccgcacactaagaagaagcgaagggtgagtaagaatatattcttgttgaagtcactagatgatctgtttcagaagggcagggaggcaataaattatcctgctcttcaggacctaatgcaaaagacaggatttgacatggatgatgtagtaaggaagtacatccgttacacactgaatgaaaaacagttcagtcctgatgtggttgtggatctcatacatcttaggaaggcatcaatgctggaagatgcagaagttgctgaaattttaaatgagatttcaagacgaattgtccgggaaaaagggccagtagttatggacttatctggttttacagagcaaggttttaagcggaagcttgctgtacaagcactgtttggaaaaatcctatacttatcagaacttccggagttctgttcacgggacagctcacttgtagtcaaagaaatctttggagttacagatgaggatgcagacagcctgcggattcacaccctatcagcaacaggtgatatcgaatctatacagaagatggtggacgatctagacctagaacaaggtcccccatcatcgtcttgagttatggtggtggaataatgctaaacatcgtcgttgatagtgttgcaattttagattgatgtgagtttctcgaatcttttcgtttagttttttcagctgctgaagtaggacttgggcctgtgaacacaggatactttcggctggagcctggaggttttgtaaattgcctctcgattaggataacgtatgtcagacctgcccatgatttgagtaaacgagaatactattattatagaaaaaaaaaaaaaaaaaaaaaaaaaaaaaaaaaaaaaaaaaaaaaaangaaaaaaaaaaaaaaa

SEQ ID NO: 5406 - DNA, 1808 bp, Zea mays
catcgagctgtcccctccctgtgctctactgctcttgcgccttgctagcttgcttgcttccctgctccctccctcctcctcctcgtcgcctcttctctggttcttcctggtgtttgccggagcgaggctaggcgcaaggggagggagctgcgctcagccagagctcatcggcgctacgcaagcgcgctgccctggtgtgctgcattgccgaactatcaggggaaaacactgaaataatggaaatcagcttattgcataatgaatctgatgcaggaagcaccagtttgctaccgctgccattgttgtcatatggtccaagatcaatggttccaatacaagtaccaccatcatcagactttgagagtatcctgtcaccagagccaatctacagtgatcttcagttgaaagagatgaactacaatgcagcagcaatggatgaaagcactgagttccttcacttgattcttagtggcaatgatgaaggatacaatagcacaactgaattacaagtttgggatgttgtggacttctatgtctcagaaaacttttctgctctccaatttgatagtttgatgggttttacaaatgaagttagtacttcctacaatgattgtatgaatttagttgatatggtagagcggcccgtggctcgtctgtctctagatgatacaccaaaacccagtaacagtgatgatgcggttccggcagacaatgtcacaatggaccctgatgaaacatccttataccttcagacaaaaccaacagattcagaaacagaaagtagttctgccgcaggagatgttgaaactgaatatctagatctaaagctactttctagatgtatgcctgatttaatggatgttgactcgcccaattgcttatcgaaaacaccagtgaaaaaaaagcatgtgactcttgtgcttgatttggacgagactctggtacattcaacattggatcactgcgacaatgctgattttaccctagaagttttctttaatatgaaaaatcacacagtgtatgtgagaaaaaggccttacctgaaaatgtttcttgagaaggttgctcagatgtttgaggttgtcattttcacagctagtcagagagtctatgctgagcaacttatagataaacttgaccctgatggaaaatatatctcacggcgtatttatcgtgaatcttgtgtattctctgacggttgctatacaaaggacctgacaattctggggatcgacttggcaaaagttgcaatagttgacaatactccacaggttttccagttgcaagtggataacggcataccgattaagagctggtttgatgacccctcagatcaggaactgatcgagttgctcccgttcttggagagcctcgtggattcagaggacgtgaggccaataatttcaaagacctttcatgacaaacttgagcagaattagtttgaggcgacagatgtatcatccagtgaacctgtcgctgaagttagcttcgctccacatggtgcaggccatcattcttgggaagttagatataggatgaaaaatcacaatttctgttatgttagctgttacaaatagcaagcataaactgcggtcgttgtctcgtcgatgaaaatggcttgtatatgtatgtccctttgggcttccgtgtcacggatcattgtacagagacgaacattagtgctgaataaagtgatctgagtgcaattttgctcaaaaaaaaaaaaaaaaatttactaataaggctttgagtttagatgagcccaacatcggaccatagttgtgcgcgcatggtgcacgccattcttt

SEQ ID NO: 5407 - DNA, 1314 bp, Zea mays
gaggccgccccgggctagggtcgcgaacgcgggggccgcggcacacgcaaaattccccatcccccaaggaagtcaggccctcgcgcaccagcgcgaccggaccacaccgaccgcccgtctgaccgacgcaacccagccgtccagacgcgccgccgaccgtccttccaccaccacgcccgcgccgtcgcacgctccctagggttccgcagggccggggatcgccggagatggactggagcgcggtgacggcggaggacttggtggacgcgctgcgggaggtggactggtccatgccgccgcggcctgtcccggagttcttctcccgcttcaccgtcccacgctcctactccaagtggaccagccgcctcaagtgcaacctctactactacaggacaaactatttcatcttgatcatgttcatccttgggatgggcttcctttggaagccagttgctatagttgctgcttttatgactggacttagcatcgcatttctcaatgatagttttgcagtcactttcaatgagaaagtcacaaggaccgtaagacaattttcaccacatttagctgcaaagttgaggccacctataactcctgttcttcgcggtcgaccaagctctaagagatcaattcatatttgtgggcgacctcgctgggtgtttgtcctgttcttttctgcagtgagctgtatactctggttgacctcatgcagtcttctcacagtcctctgggcacttctcattgctctatttgcaactgtgctccatgcaagcttcagaacaccaaatctcaaagcacgtctgaatacattcagagaggaattccgggctgtttggcggaattatagtgagctttaagggtttcctttgtttctctcatgttcatgggtaatgaaggtgtctggtgccgttgtttgtgagctgtgctaggagatctagttgaaggtgaaacgccattgcacattacatggactacttgctctcttgggaggtgggattctggttgggttgactccgaatgcgatgctatgccagcacacgatccttcaagaacagtagttttctttcgtacttctccctaaccgagcattagagagaggacagcatgtaaaggatgtaaaaatgtacttgttctcgatcaaaaagtatgttgtttgttgaaattattactaatttgtattgcatcctcttttggatcatttgttaggtgactatcattttgcttcagcatttttgtcgagttagttacatcaagtgatactttaaaaaaaactctgttcctcgtgcaaaactcgaggaggggccccgggtaccc

SEQ ID NO: 5408 - DNA, 1281 bp, Zea mays
gcacgagaccattacctagaacatcctaatcgaaaaaaaggaaaaccacacaccggccaaaccacgactgcaggaggcgggtagtagcaagagaaaggaaacgctctcccagccccaaagaaaaaggcagcacaccaactcaccaagaaagtgtggagctgctcctgcctgcagcctcctgctcatcgaccctttcgccccacaagctcgattcctcgctcggccatggctgcacccgcggaggagacgcttgccgccgaggatacggcgtcgccaccgccgccggcgaggtctgcggggttctggttccttggcgaggataagtctgtccacaaggctctcggcgggggtaaaactgctgatgtacttttgtggaaagacaagaagacctctgctgcggtagttggtggtgcaactgtcctatgggttctgttcgaaattgtagaataccatctcctgaccctggtttctcatgtgctgatcgctgcactgaccatcttgttcctgtggtccaatgcgactgtctttatcaaaaagagtcctcctgatgttcctgaagtgcagatatctgaagaccttgctgtaaacattgcgctagcattgcgtgctgacatcaacaaggcacttgccctgcttcgggagattgctctgggccataacctgatgaagttcctaggcgtggtcgtcgccctttggattctttcagagatcggggagctatgtgatctcctgagattgatgtacattgtggtcttgatcctccacacagtgccgatactgtaccacaagtatcaggaccaggtggacaatttcgctgcaaaggcgcacagggagctctgcaagcaatacgcggtcctggatgccaaagttctgagcaagattccaagagctccaccaaaagataagaaacagaactagaacgtggaggatgacaagcgccttgttttcggcttgggcgacgagagtttgtagccaatggtctgatgtggttcgtgggctttgtgtaggtgcacagtttaacgtatatgttctggtcgtgtaatctatatgtttatataaacctgtaggggtgttgatgaccatcgaaagtgtcgtaaatattcagtagtatatgtagcttagggcttaacggttgtgtttataaggtcattgtcgttgtcgatgggaagtattatcatgttattttcaggactcaggagtataaaatgaaataaaatgtgaattcatctgaagctgaaacccaaaaaagcggcaaaaaaaaaaaaaaaaaaaaaaaaaaaa

SEQ ID NO: 5409 - DNA, 1414 bp, Zea mays
  misc_feature (1271)..(1271): n is a, c, g, or t
tttgacatttgattttgcagtgggaaagaaagataccctacactctacttacactgtataatgcacaattaccattacccatgaaggaatgcagcagaattatcagactagttttgcattgttgcactgcatatttccaccggccgtgtggactgtggagcactacgcatcagtcttcagtcataggattattttatacaagtgttgtctaactttttttttctgctcgtttgatttgatgcagggctgggtcataatccgtgacgctgcccctcttattgaagcggcaagatctgttgttactcaactcagatgggacgcccgcgttttggatcttgacatagccagtgatgaaaaactactggtctgtcagaagccgtttctcagaaaataatgagcatagtagacactgacacaagatatgaacttattctttcaccctacacactgttacaattgctgtctgagcacaactgagtacaaagtttgggtaaaaaacacgggaagcatgattcagcaaacttgtcatgcatcaccatggaaccgcaaggtgccattaaattgatcggtcaagtgcatgctgcagaaacaggcttggtggctaagctttccaggccaaggttttattgccaggatatagagatgaagccataaaaattactttagtagtgaaaccatatccaataaagagatgctgctgcggtgtacataatcgccgccaatgtgccatataggtataattcattttttcccttgttacaatttctctccttttttctgtaactgtgccaatttgttttattttgtatcttgtatgtaaattggttggtctatatactgatcatcccagactacagcctagtgaaatcaatataattattatttggagatgaatgataagcaagagcaaattataatcattccactatatttatctatcatttctacaattcattatttttgtacattgtacggaacaagagtgataccttcattattcaagaagagtaaaatacatttccagtagaatacatggttaatataagaggaatgtgtcaatgtttctttgtggtagttattgcaatcttgcaggcaagtttttgcttttgatggccatttagcgttagtcggagccacttgagatgagctggcattgctctttggtttcaacatcctatgcttttgcggaggattgagcgtccagttcatcttagctgtagttgctatctgccataaccaagtgggctgtcgcattttgatgttgacgtgcnaccttagtccgaaggaattggctttgtcattcttccgtggttctggagtaaagaccatcctcccagtattatattaaaaagatactaaaatatagttccgaccgataaaatctcaactttgcccccacatcactagcgagtcg

SEQ ID NO: 5410 - DNA, 1652 bp, Zea mays
ccacgcgtccgaaaaaaaaatagagtagactcgccagccaggcagccaccctcaccctggtctggtctcctcgccgccaacgccgcctactccgcgctcctccaaaccaaactgaaccctatcctagcacgagtgcacgacggtggcagcaggagatggtggggacggcggaaggcggcgcggagagggcggtgcggcggtgggtggacgccgccggcgggcgcctggtcctggacggcgggctggccacggagctcgaggccaacggcgccgacctcaacgacccgctctggagcgccaagtgcctcctctcctccccgcacctcatccgcaaggtccatatggactacctagaagccggggcgaacattataatcacagcatcgtatcaggctactatccaagggtttgaatcaaagggcttttcaaaagaacaaagtgaaaacttgttaacaaagagtgttcagattgcactggaagcccgtgagatgttcttgaaggaacatttggagaaatccactcctatacagcatcctattctggttgcagcagctctagggagttatggggcttatcttgctgatggctctgagtacagtggggattatggtgaagctggtacgaaagagttcctgaaggactttcatcggcggaggcttcaggttcttgctgaagcaggcccggatttgattgcttttgaaacgatccccaacaaattggaagctcaggcatatgttgaactccttgaggaatgtaacattaatatcccttcatggctttccttcaactcaaaagatggagtgcatgttgtgagtggtgattcgttaattgaatgcgctactattgctgacaagtgtgcaaaggttggtgcagtcgggataaattgcacacctccaagatttattcatggactgatactctccattcgaaaggtcacagacaagcctattctgatatatcccaacagtggtgaaagatatgatggtgaaaaaaaggagtgggtggaatccactggtgtgtcagatggtgattttgtttcgtacgtaaatgaatggtgcaaagatggggctgcgcttatcgggggctgctgcaggacaactccaaacactatcagggccatacacagaactcttaaccaaggctgccacaagcatcagttacctgtaggctgtagcatagatctgtgctccactcctgatgctctcctcccagcagtaccttgagctgtatccccgagattccttaaccagcgcgaaccaatatactgttgcgtgttctcctgcaaatgagatgttctgcacctatgtttgtaatgttgtatttctgggtttttaagctatccaacttggagatacaaccggtgaggaagcagcaacaataggtagttctacttctgagtgaggaaaaacaacttgcggctgagttaatgaagcttagtagctaccaccgttgtatgacagttgctcagagatgttatcttcattaagtgcttatattaccgctagttccctgtgaaatttgttaaaccattatatgtaagttttgtttgacaagactgcatctcctgaaactaagatcttagtttcctgctaatacccaaaaaaaaaaaaaaaagaaaacccggggccgcggcccgaaacccaaaaaaaaaa

SEQ ID NO: 5411 - DNA, 2342 bp, Zea mays
cattgggtacctcgaggccggccggggccgcttttcgggattccattccatttcgttttagcttcatcactcaagggcgaggggccagcgcgcgtgggagcgggctggatttgcgcgtcctgtaccgagcgccccatgtgacaggtcgctcgcttgcccccgctccgccgctccctccctcgtcccgcaaagcaaccgcaacgcgccgagcgggcagcggggtccccggccagccgagcaatcccccctccccaccaccccaggtgccctcccagcctccgcccggaaaaggctagtgcgcgcctcgtgctcgtgctcccccgagcagactagaccagcgcgctagcgccagcaaggccaaggcgagggaggggcgatgctcgcccgatctgctacagccgccgccgccgccgggatctggctgtgattaaggatgtcggcgtcgcggagcgggaggatcaggcgggccgggagcgtggcgctcggggactttctgcggcgggaggcgtcggcggagcgggccgcgttgggaggcggcgagcggccctcggtcgcggcggggcaggcctgccgggcgaagaagggcgaggacttcgcgctgctcaagcccgcctgcgagcgacgccccggcgcgccgtccacctccttctccgccttcgccctgttcgacgggcataacgggagcgccgcagcggtgtacgccgaggagcacctcctcgccaacgtgctcggctgcgtcccggccgatctgagcagggacgactggctcgccgcgctcccaagggcgctcgtcgccgggttcgtcaagaccgacaaggattttcaaactaaagctcattcctcggggacaaccgtgacacttgccataattgatggctccgttgtaactgttgcgtccgttggtgactcacgttgtgtccttgatgctgcgggatccatctactatttgtcggctgaccaccgctttgacgctaatgaagaggaggttggacgtgtaaccgaatgcggaggtgaagttggaaggctaaatgttgtcggtggtgctgagattggtccccttagatgttggccaggtggtctatgcctctcaagatcgattggtgatcaggacgtaggtgaatttatcattccggttccttatgtgaagcaaattaagctgtctaacgctggaggccgtcttattatttcaagtgacggtgtttgggatgctttgactgcggaaatggcttttagatgtgcacgggggcttcctcctgaggctgcagccgagcaaattgttaaagaagcagttgaatcaaaaggattgagagatgatacaacttgcattgtcattgacataatcccaccagagaaacaaaaatgcactatagaatctccaaaaacgccaggaaaaggccttgtacttctaaaaaatttcttcttaaggaaaacggcatctggttcattgtctctcgctgacaaggataattatcccgagccagatttcgtggaggaggtctttgaggatggatgcccatccctttcgaggaggcttaattctgaatatcctgtccgagatatgttcaagctttttgcatgtgcaatttgtcaaattgacttggagtctggccaaggcatatccatacacgagggttcgtcaaagacagggaagctgcgtccctgggatggccctttcctttgccacagttgccaggaaaagaaagaggcgatggaggggaagcgtcactcgcgagactcctcgtcaagaaatagcgggtcaagtgaatagtgactaaagccaggagtcatcttgaggcgaccacctagcggtgtgacgagctaactcttgttgcagttgtcattgtagcagcacttcctctatacatggattaccattggacatagacagatgttggaacttggatggtgccatgcgtacatatgttggacctaatgcggtaatggaccgtcggccaaattcaatcgcctctaggtaccacaccggcgacggcgtcttcggcaaggcttgtagcagtagctcatgcaggtagtgatgacaagggactgttagcgaagaatgtcgacagtggccaatggtcatgtaaattgttcatcgtatagaggtgcaagtgacaaatagccacggttttgtaattctgagctaggattagctattgagaccctgtaattcgtctgggcagacctcaaactagaggtcaacaacgtagcctggcctattgtagaatgtatcttgctctacagtcttcatgattcaacgctgtaattaggctgttgccagtgcttctctgtcatgttagctatcgactccactcttatcaaaaaaaaaaaaaaaaaaagcggcc

SEQ ID NO: 5412 - DNA, 1447 bp, Zea mays
ccgggactcagtggcacgggcgcggacactgccgctcgcgatatttgcgagagagagagagagagggcccgagagccgaggacgagtgaagtctggctggcgtgatgctgcttcggagcgcgtcctcgccgctgctcaactgcgggcgcgcgccggctgcggcggcgtcggtcgagcacctcgcggtggtttcgccgttgttgtcaccggcagtggcggcgcctaggcatgggccggtgctgtgccgcgccatgtccgagggggacctcgccgcgccgctcgtgcccaagaaggacgatggacacgggagggcgccgaggctgtccctgtccgcgtccttgtcctcgtccgcctccatcttcgtcgaggaggaggacggcgagggcgaggaggaggaggacctggtcgcggtcgcgggggccggcgtggacgtgccgctgccgctgcgtcggctgctgacgaacacggggctggacgtgtccgccgccgcggcgctggcgttcgtggagcagggcgtcgggggcagcggcgggggcgggaaggcgtgcggcagcagcggcggcaagggtgggatcggggacggcgacggtggcagcaaccgcgccgccacggacgcccactaccggcagatgatcgaggcggacccgggcaactcgctgctcctggtcaactacgccaggttcctcaaggaggtggccggggacgcggcaagggcgcaggagtactgcgagcgcgccatcctcgccagccccggcgacgccgaggcgctgtcgctctacgcgggcctcgtttgggagaccagccgcgacgctggccgcgccgaggactactacagccgcgccgtccaggccgcgcccgacgactgctacgtcctgggctcttacgccgggttcctgtgggacgccgaggaggacgaggaagagaactccgagcccttgccaccgccttcgctgttccagggggcagctcagcgtccttccatcacagcggcctcttagatgatcgtgaactcgatctagatctcaccaccgcctgtgaacgaagctgaatctggaaccctggagagtggagagtgactgggtgataaccgtgcagaaacccccgacgagtgactcacatcgccggcaggctcctcgccgcttgtgaactgaatcacggcacatgtaaaactgaatctggcagagcacacacgcgcctaagcctattagcgtctatagactttgcagggctatgtatagtagatatgtagattgagaccctgctgagcttgtacgtgcagtatgttcctagtcacttgtgtatcattactagtaatgcagtatccctcgcgaaataaacgtcaaaaccccttcctgctgcttcataaaaaaaaaaaaaagaagagcagatatcgaactgcaagaactgatgcactgaatcacaaagctttacaaaaaaaaaaaaaaaa

SEQ ID NO: 5413 - DNA, 2678 bp, Zea mays
atgggtacctcgagccggccgggaaaccccatccaaccggtctcgagtctcgacagatcggcgtcgatgaccctaccactcgctggccctcccacgccttccccggcatggccgagcccaccccaccgtccctcccctcgtccgactgcgcagacgtgctcgtgggatcctccgccccctccttcccctacatccgcggctggtcattcccctccgactcgggcgctgccatgggttctgtagaggaacatctccagcccaaggtgtgcgtgcagacgagcacctccgcggggcttgagcagatcctgccctggctcttctatcacaaggtcgtcggcgtcgcgcagttcctgctcttcgtggagggcaaggcggcgaaacccaatgtcgcgggagtcctcgagtcaattcctggggtaaaagtggtgtacagaactaaggatcttgaggagcggcaggcacggaggtcagcttcgttttctcagtcccctgtttccgataacagtttttcttgtgtgtcatttgatcatttccacataaacaccatataaaaaaataactgcatcttgtttcaactttcaaagtgagaaccaaaagcatagggttgctggtgtagccagacaaaactaagtcagaccgcatccaaccattgacaattatggataaagggagaaattttctatgcctagttgcctactattaacccacttctaggacatgtcgaagattgtttaatagggaatatacgtggaatttagacaggtttgagccctcgatgtgagataataccctacatcatgtttgaggtggttctgttgttgtattgtatgttctaatctgatgattctatgatctgatgctctcaggcggttccctgtccctcttttaatattctaaggagtgacggaagttacatgataggcaccgagtcggctatcaagttcatgatggaaccgagtcggtacaaagtcatacgtgaattgaattctatgtcttcgagtttatctcttattctgttgagatcttactatatctgcgcttctagaatcctcctggttgtaggctcccctggtcctattgccgagtccttcggcttgtggccgagcccatgagctcttttgctcaggctcttctttacgaagcttggatagatgtcctagtatatattattgataggacatagcatgtcataatgtctggcttggcatgttctttgatagagtttttatcactcatctctgtcaccttcctgatgtattttattgcctcgcctccggtcgaatctggaatgagacttggctttcaggatttttctacaaaccttgcaactatgaactctttgtgaagcaatccctcaacatggagatggctattgtaatggctcgggatggtggcatggattggatcatacatttagacactgatgagttactttatcctggcggagctgctgagtattctgttagacgtttgttagctgaggtccctcgtgatgtcgacatggttatttttccaaactatgaaagcagtgttgagcatgataatataaaagatccattcagcgaagtatctatgttcaagaggaattatgatcatcttcctaaagatacttactttggcatgtataaggaagcgacacgaggaaatccaaattattttctcacctatggtaatggaaaatctgctgcacgaattcaagaccatctccgtcctaatggcgcgcacaggtggcataattatgcaaagagcccaaatgagatcaagttggaggaggctgcagttctgcattatacatacactaaattttcagatttgacatctagacgtgatcgctgtggatgcaagcctacaaaagaagatgttaagagatgtttcatgttagattttgacagagcagcttttataattgcatcaactgctagtgaagaagaaatgcttcgctggtacaatgaacgagtcgtgtggaccgataagcagctgaacttaaagcttctgaggaaaggagtgctgactcgcatatacaccccaatgacaattgttcagagtctgcgcgaatccggtgtcttcacttccgccattacagctggccaacctgctgtgaatgccaaactctcacccaaggaaaccaatgcgcagagccaaaatgttaccgcacctgggaacatgacaagagtggtcagatctactgattcaaaggcatcaggcagaaagatactgcaagccgttgatcttgccttcagcgatactaatgtaactgctgttccaccgttgtcgccgcccagtttggacgaacacaggcatcatagtgaataataatgtcatacgtatgatatatatattttttgctcggcgtataagctcctaagaaaaggaagaaaagaaagttactgacatcttcgttaagagaagtgctaacatcagcttggatggtcaatttttatgcaatctgcggcagcgaaattctggcaggcgtcttttttcgcgatcgaagtgagatgcgggtgcgggcaacattgatagatagtgttttactggaaacaaaacatatttttagcaattttgtacaaaatctttatgaagttattaaccatatatggactttacttttcgaggggaactgttccacggcaagaatctgttaatgggtggagtagggtggtctttttaatgggcttgcc

SEQ ID NO: 5414 - DNA, 1946 bp, Zea mays
ccggccggggcggcaccgcctcccccgccggcagtaattgacttgacctcacttcccctgtggggaggctttaattttcttccgatcgatcatagtatccgctgcggtgtgattgcctgcccccaccccattgcgcctgcgcctgcgcctcgcttcatccggtgcgctgcccgcctcactcccgtcgtcctcttcctcgtcctcgctctcgtcgcggagcggtgtggaggcgcgcgctccttgaaggcacggggcaagagcggaggaagatcatctgggtgttggagtcatccagaggcacaagctgaggaatggggcaaaaggactccaagccttcacatggatatggctactcttcttatgattacgggagtgcttcatcgggatacacctcgagaaacactgggaattcgtcctccagttatagcgtcaggtacgcgccttcttcggagaacagtgtacagccggagacacatgccaggttgcagaggaagtattccaagatcggtgatgactaccgttctttgagccaggtgactgaagctttggcacaggcaggccttgaatcttcaaatcttattgtaggcattgattttacaaagagcaatgaatggacaggtaaaatttccttcaatcgccgctgcctgcatgatattggaaacactccaaacccatatgagcaagctatatctattattggaaggacactttcagcatttgatgaagataatttgattccctgcttcggatttggtgacgcatcaactcatgatcaggaggtattcagcttttacccagagaaccgcccatgcaatggatttgaagaggcgctagacagatacagagaaatcgttccaactcttcgattagcaggacctacatcctttgcgccgatgattgagacagcaattggaattgttgacagcactggtggtcaatatcatgttcttctgataatcgccgatggacaggttacccgaagtgtcgatacacaatctggacagttgagtccacaggagcgggatactattgatgcaatagtaagagcaagccagttccccctgtcaattgttcttgtcggggttggtgatggaccatgggacatgatgcaccagtttgatgacaatatacctgctcggtcatttgacaatttccagtttgtgaatttcacggagattatgtcgaagagcatagcagctgacagaaaggaggcagaatttgcattgtcagcgctgatggaaatccctacacagtacaaagcaacaattgatctccaactcttaggccgtcgccaaagaataaccccaagaattgctctgccaccaccaacaaggaccgcgtattcgcggtccagtagctttagccaacagtctggtgtttattcgcgatcaagtagctttgaccaacaaacaagtggcgcctctcagcaacgttctgagagcttgaaacagcagaagaaacctgcagccccgaagagacctgacacttatgcttcagaaagagctttagaggacagaattctgtgccccatctgcatgtataaatccaaggaccttgcatttggatgtggacatcagacttgctacgaatgcgggagaaatttggagcgctgccctctgtgccagcagaacataaccacgaggatcaggctctactgatttgatcaggctatgaattagaaaaatgttggaacaacagactcccgggcaagatgttcagaaccagctttgtttgtaccgtgcttcattttgtaattggtgtcacttttctcggtagttatgccaaaggaaagcgcaccagaaaaaataatgtacatatttatcttccagtagtactgtacattgcgagctgcacatagatcaaggtgtttttttgtgtggggggggggggccggtgttcaaataggggccgggtgaagggaagaaatcaaggtgtcatatatatat

SEQ ID NO: 5415 - DNA, 3174 bp, Zea mays
aaaataataataataataataataataataaccatcctttttttttttttaataataataataataataataataataataataataataataataatatactggttcttttgctagcattacttaatttgtttctcaaaaaaaatgtagtaaacacattaattactacatacaatggactcaaggtacgagtaggttctcatctcatctgagacccggctgcatgagcagctcgtcgaaagatgctcctccattctgctccacgctacctgaacccatcctgttgctgcaattggacacgagcacccgctccatggcaatggcgtcctggatctccttgagcacttccgagatgggaggcctctgggcgcccttgggcttcacacacattatggccacctccgcgatcttccacaccgactgcaggtcatagcagcctctgtccaacgactcatcaatgatggcgtggatgttcccgctctcgatgtgcgatcgggcccacgcaacaatgttccggcagttgagcccaaagttgtcattcgagatgggttcatgcccagagatgagctccagcaaaatcacgccgaagctgtagatgtcgctcttctccgtcagctgctgcgagatgtagtactctgggtccaggtatccaactgtccctcgaactatacttgacacatgagacccatccactgcaggtttcgaaagcccaaagtctgccacttttgctctcatgttcttgtctaggagaatgttactgctcttcaggtctctatggatgattgttggggagcatcccgtgtggagatactctatacctttcgcagaatcttctgcaatctcaagacgcttcagccagctagttatcttttcattatcagctccacgaaggtgctcttttagtgtcccattatgcatgaactcatacactagtatgtttttgccatcttgctgactgtaaccaaggaatgtaaccaggtgtctatgatgtattctggaaagcaatgtcacctcattcaagaattctctgattccctgatacgagtcattcgtgagaagtttgactgcaatctctctcccatcagccaactttccatagtatactatgccaaagcctccagacccaattcttctctcaaatttgtcagtagcattttcaatttcagataaagaaaatctgtgtgctgattctgtagccacttcactaaaatatgaaccaagttttttagctggtgctgctgcaatgacaacagtgtcttcatgagatttattctttctcctacatgtaatgaaatagcacccaatagcaacacccagtaagacaacggctccaatcaccacacatataataattatggtgtggctaatgccattgcttactatgtgaaggccactgttgcctgagaagttcaaaataatgcttctcttgaaaagtgcttttggaacctgcccagacagcttgttattttgaacatacaactctttcaggttaggtaggtcacccaaagaagatggcaattcaccagttaactgattgttctcaaggtgaatatactgcaaattcccacattctctgaaatcaggaatttggccagaaaatgaattaccatcaagccttagctcaaccagccctgatagctttgtcagttccaccgggatacttccggtaatgttcttcccagacaatgtgattgagaatatccttggagaagtttctgaactgcattgcacccaggaccatgatgctggtaagcacggatcaccaccctcttgtgcccaactttcctgtggatatcgtgataccatgctggccatgatatttgcatcctgtgatcccatagtaatttggacatatttgtaaatctccagggcattcaaaataggcccctttgaagaatcattcgtcttcctgaacccaaaggagaaaacaaacggaagtgacaaattcgtgtagcctggttcatacaaacggtatttcccttgagcattctcctccacatcaacagttggtttactgagtgctggcatgccagggacctctaacttaaatttcctcgtttcatttggtgccaaatcttcaatttctgcaaaatacgagactccccaagcatttgctgggaaaccttccaaatcaaggcggtagttcaatgacccatcctggccaactactgctgtttgcatgaccttttcaggtggttcttcgttggtaccgacaaatatgggttttgtagttgatattctttcagtccctggagcaacatcaacaaggtaatttgctctcctcacagaatcagattcccagattctatcaaatggatcatcaggatatctcactgaatcattgcttcctgcgccaaaatttatcctcgcagacagtccaagaaagaagcgtgtctcgtcagtggtgtagtagagcgaaccgttaaactgtcgaagctccagagtagagatgaagggctgtcccgtgctggcattggagagacatacactgagcgtgggagcagcagccaagatgatggcttcctcaacgacgggggtggtggcgtcgtcgacgacgatggtggaccagggagacgctccgagggagatatcgaacttcgggtagacgttgctgttatcgaagttgccgtagaggaaagtggccctgacaaggtagcgcgtcctgttcctgacgttcatggtgtagcagtgcttcctgttgtccgcggggaagtagcgcacggtggtcagctgctgctgggtctgctgcaggccattctggaccagcagctgcgcggcctggccgccagagacgaagctggcatcagaggtccactggatcccaatggcatccgtgtgatcacgagctcccccgcagtccaagctaatgaaaccaggctgcgcagcggaaggcgagaagaggagcagcagcaggtggaagaggatagcggcggagaaggcggcagccatggaagtcggcttgcaagttcctcctctctcgcagcctccgccaccgcaaagcacagtgcgccacttctgctgctgttgctgttacaagcaggcaggcaggcaggatcgatctggtagtagtcctagtactagatcagtgtgttggtggacatggttggagaaaacctgaagcaaggcgatggacatccagctttttcggccgctccgtctgcacgcggcgctcgt

SEQ ID NO: 5416 - DNA, 2052 bp, Zea mays
  misc_feature (2052)..(2052): n is a, c, g, or t
ctcgaggccggcccgggtaccgcacccacaccacaccacaccaggctcctcgacagtcgatagcctcccaagtcccaactcgacctgagccgattcggaaggacggtttgcctacctctggttccggcggccatggcggtggcggcccctggccagctcaacctcgacgaggccccgtcatggggctcccgcagcgtagactgcttcgagaagctcgagcagatcggcgagggcacctacgggcaagtgtacatggcgaaggagacgggcaccaacgagatcgtcgcgctcaagaagatccgcatggacaacgagcgcgaagggttcccgatcaccgccatacgcgagatcaagatcctgaagaagcttcaccaccagaacgttatcaagctcaaggagatcgtcacctccccaggcccagagcgggacgagcaagggaagccaattgacggtaacaagtacaaggggagcatttacatggttttcgagtatatggaccatgatctcaccgggcttgctgatcggccaggaatgcggttcactgtgccgcagattaagtgttacatgaggcagctgcttacaggcctgcactattgtcatgtcaaccaagttctgcatcgagatatcaaaggatctaaccttttgatagacaatgagggtaacttgaagcttgctgattttggccttgcaagatcattctcgagtgatcacaatggcaaccttactaaccgtgtgatcactttgtggtatagacctccagagttgctacttggaagcacaaagtatggcccagccgttgacatgtggtcagtgggctgtatttttgcagaacttctcaatgggaagccaatattgcctggaaagaatgagccagagcagctgactaagatcttcgagctttgtggtacccctgatgacacaatctggcctggtgtcacaaaaatgccttggtacaacaacttcaagcctccccggccattaaagagacgagttaaagatttctttaagcattttgatcgacatgcactggatctgttagagaagatgttgactttagatccatcacagaggatatcagcaaaagatgcacttgatgcggaatatttctggactgatcccttaccatgcgatccaaaaagcttgcccaagtatgaggcatcgcatgaattccagactaagaaaaagcgtcagcaacagaggcaagcagaggaagctgcaaagcgtcaaaaacttaaccatcctccaccacattctcgtttgcctccactccagcagcctggccaagcacatcctcaaatgaggcctggccagggtatgcacaatgtgcctcctgtggcagccggcccaggccatcactatgcaaaaccccgaggaccaggaggccctaaccggtatcctcagggtgggaatcaagggggaggctacaatccgaaccgtggagggcagggtggtggctatggcagtggcccttatccccagcaagggcgagggcctccttaccctggagcagctggcccacggggcagcggtggcagtggctatggggctggagggccaaactaccaacagggtggcccatatggtacgtccggtccaggccgaggaccaaactactctcaaggtagtggttcccgcaaccaacagcagtatgggaactggcaataatgtggcagtattatgccattgatatgtatgtatttgcagaatgcatttgcagcacctttgcactttaagcatgttgtgagatgtatgtcatgatagtactctaattcagtccagatgtctcagaagagctgtttatgactccagatgtagattatgattatcgagaaacgttttgtacttagaacccttgattcacttattagaagtatgccacaaagacctagcagagtttgctattagccccagtttcatacttcatatccaaattggaatcaggaacgcatagaagaagcctgaagttcagaaatgaaatttgttatggttgtgtacagttttgttatcacttcgcttcaatcacattatgaagcttaaaaaaaaaaaaaaaan

SEQ ID NO: 5417 - DNA, 2220 bp, Zea mays
  misc_feature (19)..(30): n is a, c, g, or t
  misc_feature (2213)..(2214): n is a, c, g, or t
ggccggccgggaaaaaaannnnnnnnnnnnaagaccgagagagaaaggaaaaaaaaaaacgcggcgcagaagccagaagaaccagcgagccaactcccaacctctcgcccgatctcgatctcgatctcacgggcgccgccgccgccagcgacgatggatccagagatgctgcggctggcgcaggagcagatgcgccgcatgtccccggacgacatcgcccggatgcagcagcagctgatgtctaaccctaacctaatgaggatggcgtctgagagtatgaagaacatgaagcctgaggacttaaggcgagctgcagagcaactgaatcaaacaagaccggaggatatgcgtgatatgaccgagaaaatcgccaacactactccggaggagtttgctgctatgaaggcgcaagcagatgctcaaatgtcctatgcgatgtctggtgctaagatgttaaagaagcagggaaacggacttcataaccagggaaagtattcagatgctgctagtaaatataagcttgctaaggataacttaaaaagcataccatcgtctacggcgcatactctgcagttgcaatgtacacttaatttaatggcttgttacttgaagacaggccagtttgatgaatgcataagtgaaggtacagaggttctaagttatgattcaaacaatgtcaaagcatattatcggaggggtcaggcatataaaggactcgggaagttggaggcggctgttgctgatttgagtaaagcccatgaaatttgcccagaggacgaaactattgctgaggttctaagagatgctgaagaaaaacttgcacgggaagggggaggagtgagcacgcggaaaggtgttgttattgaagaagttgttggagatggcgcttcacagccatcaagcgagtgaaagaaattcttctgggtatactgtttcacaacctacctgaaggagcaggaaatattgggctgtcagggtctttagaaaggccaagggatgatcctacttctatcaggtcatcccaaaattatgtgtccaagagcgatcctgagggcgggtcaaacttcggaattgaaggaatgtcgcctgaacttgtcaaaactgccactgatatgattggctcaatgaaaccagaggagcttcagaaaatgttcgaagttgcttcttcattgaatagcactagctccgctggtccaaatctgggacccaatatgccagaaatgtctcctgatatgcttaagatggcatctgacatgattgctagtatgcctcctgatgacgtacagaaaatgatgagttttgcttctcagatgggtgggcctggtggtgcccccaggagttcagagaatattaactttggaccttcagtgagagctacaacgagtaattctgcccgtggatcatcatctcaacctgttttggagaaccctgatgaactatcagatgaccaaaggatgagccagtcatcctctagtcttccaccttctacagctgatatgcaagaaaccatgaggaattctatgaaagaccctgcaatgcggcagatgcttacatccatgatgaagaacatgagccccgagatgatggcaaatatgagcgagcagtttggaatgaaactgtcaaaggaggatgccgcaaaagctcaacaagccatgtcgtcattatctccagaggatttggatagaatgatgagatggatggagcgagcacagaaaggggtagaagtcgcgaagaagacaaagaactggctcttgggccggcaaggcttgatccttgctattgtcatgctgatcctagctttcatccttcatcagtttgggtttatcggcagatgatgggggtgacttgggtggctgcatcagcatggaaatagattattcgatggcgatgcagagttccctcttgctaacaactgcttaaaagcgctttgggggaaggccggattacgagaattctttgtatccgtatcttatgaaagtgtaactctgtccataaagctatttcatcctatttttaccagcaaaggtagtagaaaggaatcgagccgaaactgttgtgataacaagacgacatgtaatatgataatatccttgtggtgctttcagttttaagtagcagttttgtttaataaagcatatgcaaaggtgaagtggaacaaagtacatgcgcacacagaaactaactggaagatagcatcttcaattcttaaaaannaaaaat

SEQ ID NO: 5418 - DNA, 1060 bp, Zea mays
cagtagtatcttgaacgtcgagccctcccggcccgccgccgcagtccacaaatccgcacccaaagcaagcccaacgaaacccagacggcaacgagacagttgtcatctcactccaccgcaccgtccgcgcacggctcgccggccgtcactcacacaaccagcacgacaccatccgttcctggccttcctcccgtgcaactaccactcgcgtcaccgcggaaattaaccccgaaatccagcgccttcggcacgagcacgaccaggcctgcgcaggagatggggcggagaggggagccctactacgtcgaggcggtgccgccggtggacgtgaacaagaacacagagtggttcatgtacccgggcgtctggaccacctacatcctcatgctcttcttcgcctggcttctcgtcctctccgtctctggttgctccccgggggcagcctggaccgtcgtcaacctcgcgcacttcgccatcacttaccacttcttccattggaagaaaggaaccccttttgctgctgatgaccaaggcatctacagcagattgacatggtgggagcaaattgacaatggtcagcagcttactcggaacaggaagtttttaactgtggtacctgtggtgctgtatctgattgcgtcgcacttgaccgactacaagcagccgatgttttttctcaacacgattgcagttttcgtgctggtcgtggcaaaattgccgaacatgcacaaggtccgcatatttggaatcaatgcagacatctgaggacagctgcaagaagtacatggatgcgatgccatgatgttatgaacaagcagtgtgtttctcaaactcgacacaactgcctgtaatatatgtacaggtttagaaagaactgtaaatgaatgatactctaggatacaaggtttgcctgcagactgctctgtgttgccgttgccgctgctttcttttgagtttcactgaaagtggaaaccataacttgggtaaatgtaacgttcggttttcagcttcagcaagacaataatttaccagcaaaaatgtttcaaaaaaaaaaaaaaaa

SEQ ID NO: 5419 - DNA, 1595 bp, Zea mays
gggacccggcctcttctccgacatcggtgggaaggaaggatctactcattaaggactacacctacgaccagaagctgtccatctccaccgccagcgcctctggagtggatacctgaccaggacaagagatagagtctagttcggtcctttaagcgaatcagaatccgttcgtcggagaggccatgggctcggcgcaggatccgttctacatcgtccgggaggagatccaggagtcgattgataaattgcaaagtaccttccaccgctgggagcaaactgcttcaaacacaggagaatatgttcatctgacaaaggagcttctgatcagctgtgaaagtatcgagtggcaggtagatgagctagaaaagacaatctcagttgcatcaagggatccggcatactatggacttgatgaagttgagctttccagacgaagaaactggactggttcttctcataagcaggtcggtacagtcaagagagctattgaaaagggcaagagcaatgcagcaacttcaaaataccaggatacaagcaggaccaaccactattctgcccaagataatgatgactttctttcttcagaatcagatagacagcttctactcatgaggcagcaggatgaagaacttgatgagctcagtgaaagtgtccaaaggattggtggcgtgggactaaccatacacgaagagctgtctggacaggaaaggatcctaaacgacctaagcttggagatggagactacttccaacagacttgatttcgtgcagaaaagagtggccatggtgataaagaaggccggcatcaagggtcagatcatgctgatcgtgttcctgattgttctgttcatcattcttttcgttttggtgttcttgacatagccaagtgcaccagggtcctcggttttctctctcatttgttgtgcctccctagtacgaacactagtaaattggtcgcgctccgcgtgagttgttgcttgatgtgcttacataagatgtagaatcttgttgctataggcatgtatcaacaggtgctagcagcttgcagttctccttctaacagaaacaggtcgaagcagattttttgttctccaagtgatcagtttgtccaaggttgttaggctttccgtaatcgcttcgagtttgcttttcaagatcatcattcacaggttgcttgttagactttggctcaacataaggaggcagcatggattctttatgtttgcaacatttagcttagtgtaaggagccttgtttctagtggtaccaccacccggtatactaagaagactcaatgaacgcccttgattctctgggtgctgagctcttacccctgaatctgcatgtctcccattgtgttcatgaccaccaggccattgagatcaagctctactacctccatcagcttcttttccaaagggcgaacaacttttctgtttagcttctgaacatccttttttgggtcctgttagtgtccacaggagacactggtttatgcaaatgttcattctcaacagacacatcaggttgttgcttcctcgaattcttatcaattgtatggtgtgcgttagcaacagaacgaatatcttttggatc

SEQ ID NO: 5420 - DNA, 2313 bp, Zea mays
gccgtgtctagtgtcttccgtctcgatcccgcgggtgggactcgccggcgacaaaaacgaaaagcgacttgccctccgcggcctccggccttcccactccactcgccctcctctcctagcgtcggtgagccggtgcgctgcagtccccgctccccttccgcgtcgccgcgatggaggtcttccgggagcacggggacgacggagtgccctaggattccatcacgccgccaagcaccagtcccgcagccagggatttcttctccgaccccgaccttcatgtgagtcgcggccttcctcctcgaagcggatccggcggattggaggggcccaaccatagcaggtacttcttgcgggtgtaagcatttcgctgcacttggagacgcttatttggagtatttgaaggctttggagactgcccagatgaagagtagatttcttgttctctgtgccattgtctgcgtcatggctcagatgggagatgccaatgtcgtgctattggggaataatctgaccttgtcctttgctgatattgaggcaagcttttctccaggagtgaaaggatcaggagtcaatggcatagtttatgcttctgaacctttgaatgcctgcagcccgttaacaatcaaggcagtcaagggcccgccatctccctttgcattaattgtaagaggcggatgcacgtttgatgagaaagtgaaaaatgcacaggatgctggattcaaagctgcaattgtgtatgacaatggaaataggggggtcctggtttcaataattgttgcagtggctggaagctcaagtggcatacacatatacgctgttcccacgcgtccggcctcaggagaggtgttgaagaaatcttcaggacatactgatgtagaggtgtggatactacctacattcgacaactcagcctggtcgatcatggcaatctcattcatatcgctgcttgccatgtctgctgtattagctacgtgtttctttgtgagaaggcatcgaataaggagagaccaccctagaatcccagaagctagagagttccatggaatgagcagtcagttagttaaggctatgccaagtcttattttcacgaaagtgcaagaagataactgcacatcatcgatgtgtgccatttgtttggaagactacagtgtcggagaaaagctcagagtgctgccttgtcgtcacaagttccatgcagcttgtgtggacttgtggctaacttcttggagaacattctgccctgtatgcaagcgagacgcgacgagtggagtatcagaacttcccgccacagaggctacccccttgctttcttctgctgtccggttaccttctcagccatcttcattcaggtcgagcgtggcagcctccccacccaggccgataagccggcatccttcatcgcactcggtttctcgtgcttactctgtctctagtaccccccactcccccaaccccttcagatctcacacaaacttacctggcgtcatccatgcaagcagaagcaccgcagaccttgcaaacatgtcgtctccccaccctcgcatctcacacttgtcgtcgtcgacacactccctcgtcggcagccacctatctccaccaatcagcataaggtatccattgccccattctcggcatgaatcgcccagtccacacgtcagttcgccctacatctcaaattctggctacggttcttcaagctactactaccttggcggctcgagccagcacgggtcgtacctgcggcggtgtggagagtcagggccaagcctgtctaccatggtccctcggtcatcgcagcagcagttccagtcagaggcaaacgtggccgcaggcgcgtcgtctgcccagtcctcacggcagtcctacctgcgacgctgtggcgattcagacgccagcttgtctgacatggcgtcagcccagtcgttgccggggtgctgaggcagatgtgcactacaagatgcggcttgacctgtgcatacaatgaggcttgcagcgtcacataggtggggaacatgtatagcatagactttatgatcctgttcttgtctgtgagtggtatatggttctttttttgtgccttttattgtgtgcatctgacgtgacaggagcctgttgaagttgattctgttaacattttagtccgcaccatgcgtccatgccaacttctccctagatttgctactctactaccatgcacacatttgaacgaggcagtgctcagctgcatgcatctgatgttaatgttgtgctgctcgctcagtgagcatgaagagatggtcgtctgagcaaattcagaaaacagccctttgtctg

SEQ ID NO: 5421 - DNA, 3231 bp, Zea mays
  misc_feature (3130)..(3130): n is a, c, g, or t
cggacgcgtgggccgagcgcagccaaacccaaaccctcctccctcccggctctcgacgggcgacggcgatggccgccgcgacagagaagacggctgaggacatccgccgcgagctccaggagctccagcgtcagcaccgcgagatcaccgagcgcctgcgcgacccccgtggccttcgccgcggcgcccccggccctggtcctggacccggggccccccgcccgctccgcggcttcgcgagacccgctgtgggtccggaatcgggggatcaacctccgcagaagcgtcggctgctatcagccgtagttaaggtatcttctttttctgcttcaatttcgcttctgtttccgcacgcggtaatggtctgcttgtcgaaacaataaaattatgtctggttgcttgacataacaactggaggtggatggggctgaaaataacgaggaaggcacaaaggatgcggatgcggaggggcatgggacaggttcaggtgccactgaaggcagtgccgggaggggtttcaacaatggcgggttcagaagggatggtggcttgcggatgcagaggagagtggactataattcgctgccagagccagctccaagggagcttcccaggaatgaggacccgaatttggtgagaagaaataagaggatgctggggcagcttcttgtcggtacattagagaaatttcaacaagaagataaaaaactatctaactccgaggcttttctgcgtagatcagagactcagcgaaaggctgagcaaaaggtccgcgaagaaagtgaaaggctgcgacagaaggaacgtgagcaaattgcagagaagcgtaagcgtgatatgacgcttcgcgctcgtgtagctgctaaggcggaagaaaagaggttggagctgttgtacattcagtggactgagcaccataaaaggctgtccaatttcttaaggttatttttatttctggtccaaaagtgtccatattgacaattaaattgagggaagatacattctaattatgcagacttgatgtttgataaccattagtgtatctatttacattgtatactgatgaacaatatttgttccatgtttgactctatcttattacccccttatgttggcaggacaaaagctgaaccacctatttactacatgccaactaaaccaattattgacgatccagccattgttgaacagaacaaggaaaaggtatatcctagtatcttttttctcgaaaagcgcaggagaactgcgccccaaatatatattaggaggaaagaaaaggtctaagaagacccaaaatacaagacactccttacggaggccagaagcaaccatacaggaagggatccataacacagtaaaaaactacaaaccacttagccgtagcccttaagcagtaggaggggcagccaaaaaggaaagacctttggcaccagcaatctgccatttttgcatttcctcaactaccaactcaaggagaagagtgagattgggagatattccatccaaaaccactctattccgatgtttccagatcatccaggccccaagagtgatgcgggagttcagacctctcttagtcattccagtaacaacagcagatgtcctttcccaccaatccaagaaggaagtagcagccggctgtggggctaaggagtgcaggcccaacttccttagaaggttataccagaaaactcttgtgaatacacaagacgctaacaggtgattgatagatttaggttcttgatcacataggggacatctggtaggatgattcaatcctctttttgccaacctgtccgcagtccaacacctattgtgggccactagccgtatgaagaatcgacacttttgtggagcccatgatctccaaacccttttgtaatgcccaaaggagcttgcttgacccaataaacaggcctttgtaagctgaactcgcagaatatttgccattaggtgccaaggaaaaaatgtgcttgtcttgtgcatactcatgtacttgttcctgtttcatgacttttcgtttgtgggtgaaatggtgaattaaacgttcgaaaaacgctaaaggtattcgaagaatggaaatctatgcgcagggatgagctgactcggttccaaaagcaagttgaggagcaatatctctcaaatgtggagaggcagctggagaggatccagaatgcccggaacgctcgaaaggcgaacgggcatgctaacatgcaagaaatggacaaggagctggacacacacagggcggagcatggtccgaagactcggcgagttcctgaggagggcggtaatgatgacgacgaagacgcagaggacatggctgcggaagacgaggtgatggatgaagttctgggcatcaacgatgggatcaacgaggacccatccaagccgtccgaagaagctactactgaaggtggtgagcctgcacccgaggaagcacaataggattctttgttcacacaagctaggcacatagccgtacgtaccattccgtatgcttagttgccgtattgttgggaactgtttgtgcgtgtatttctgttagacgttccccgctggtttaggctgtgttttataatgctgttttgtctttttgaatgttgagaccatacaactgtcgatcattatctcataattgttgtaaaaatactataattgataccttgatttggacgtcggtggcgttaaacgtttcgggttctgttcttcactacccgtgctgcagcctctagcgcacctgcacgttttctctcgtgccttgcccactccggatgccacagaatggttatatttttaacatgctcgcatgttttccattagtctcttttaccgttcaactcaaaagcagctaaatagaaaggtgtaaacgtgaaaataaatgggtggggtgtaaacgtggaaataaatgggtggagtcatgaagatataaataaagtctctgtcaaaattcgaacttaaaactgataccattcgaactcaaaacctctgactttgatactatgtttcaatgaatgcactaatcaattcaatctaaaaatttaaactgatgaaaaaagttagttaattcctttatacatttcgacatatgctattaaagttgttgcggagaaggtttcacctatgttgnttctccaaatagtgtagttgggcggcaacctttgccgcagagcagaggtgagtaggtgaccggaagagaaatatgatatgccaggataagaaaggaaagta

SEQ ID NO: 5422 - DNA, 1873 bp, Zea mays
cattgggtacctcgaggccggccgcgccggctgcttcccggccccccgccccttcttccccgactcgcccggcgctgaataagattcccctgtattctgttccagagatgagctgatcgagcagcccgtcgccaagccaaccggacatggtgagcgacggcgcgcgcgggctgctgggcgcgtacgagctcgggcggacgctcggggagggcaacttcgggaaggtgaagcaggcgcggcaccgcggcagcggcgggcagtttgccgtgaagatcctggagcgcgccagggtgctgtcgcagcgcgcggacgagcagatatgccgcgagatcgccacgctcaagctgctcgcgcaccccaacgtcgtccgcctccacgaggtggctgccagcaagacgaagatctacatggtgcttgagctcgtcaacggcggcgagctgctggacaggattcaggcggccagtgagggaaagctcccggagcaggaggcaaggaggctcttccagcagctggttgatggtgtaagctactgccatgaaaagggcgtctgtcacagagacctcaagctggagaacgttcttgtcgaccggaagggaaacatcaagatctctgatttcgggctcagcgctttaccgcaacatctcgggaacgatgggttgctgcacacgacctgcggtagccccaactacattgcccctgaggttctgcagaacagagggtacgacgggtcgctatcggacatctggtcatgcggggtgattctctacgtgatgctcgtagggcacctcccgttcgacgaccggaacatcgtcgttctctaccagaagattttcaagggcgatgctcagatcccggagtggctctctcccggcgcacggaaccttctccggaggatccttgagcccgacccggcggagcggatcgccatggcagagatcaaggcgcacccatggttccaggagcactacgtccctgtccttcctccgtacgacgacgacgacgacgacgacgattcagtgaagcaaatcggtgcgggtagtaaaaccactcatcacatcaacgcgtttcagttgatcggaatggcgtcgtccctagacctctcagggttttttgaggaagaggacgtgtcccaaaggaagatcaggttcacgtccgcacaaccgcctgaggatttgttcgccgagatcgaacgctctgcgactgacatgggcttccatgttcacagagggcatagtaagcttaggctgacgcgaaactgcgaccggtcgaagaatcagaagaaccctatgtcgtcatcgtcgtcgtcgtttctagtctgcaccgaggtttttgagcttagcccctctttgtatgtcgtggagctcaacaagtcccatggcgaccctgcactgtacaggcagctctgtcagaggatctgcggtgacctaggtgtgctcgagatggaccagatctttgggacgaggccgccggtcgccgacgatctcgcgggcttggccttggcgttggagagacgatctgcgacgcctttggttgcgttgtgacgaaaggctgcccccgccggcccccctgaccgtgatgtttgtagcgtcagattatttagtgacgacgaagcagttcagctgcaacgcagctcggaacggttgtgtgatccctcccagaaatagaggacaaggtaaaagagtgtagccgtacacgtgtaggatcatgctccaatgtaaataaagtggtagtagccaccgatgtaaaactgaatgtaaaatctaagaaataaatcgtttatccagtacacagaagctctatagtgacggtactagagctatttgtactaacgtttttcagtgcaaaaaaaaaaaaaaaaaaggcccctagggcc

SEQ ID NO: 5423 - DNA, 3505 bp, Zea mays
  misc_feature (2202)..(2202): n is a, c, g, or t
  misc_feature (2714)..(2714): n is a, c, g, or t
  misc_feature (3063)..(3063): n is a, c, g, or t
tgcagttcttcgttcaaagttgttatgttctatgtcggcctcgaacaagctgctgcatctcttatcatataatcacggatcaaattctgataatattcacttgtacaaaccgagtacaaatcatccagaactttacgaagcttgccttcccagattttctttacacagctttacgtatttttccttgattattcaatcttttgctgacacatgtttcctctgctattagtcactcaccaaggaggaggagaaagaactcaaggaaaccttgcaggatatccttggggaaaacaaaactattttggttgaacagaaggtaactgcttgaaccacgagcttcttgagagtaatatatgaagggatgctcctcaactgtgccgtctctgttgaagattgactacagcatcatgggaggattagtgattgaattcgggcagaaggtgcttgatatctcaatcaggaacagggcgaagcaaatggaggcgttcttgaggcaaccacttgacttctaacagccttttggataaaagaagcatcatcggaatgcagaggctgtcctgttgaaggttttcctgtgtctgcaattttaatctggccttttgaataaaatgtttcctctaacaagtgaagggcactgtttttattgtctcgtgggccacagatgcctgctgaacaatttatgttcatttcttcttttcttaaagaagcatgcactaagaacatgaaggatgcatgtcatggaaagtttttgaaagtcattgaaacgtatgagctcctcatgcaatgcattattctccttatattcaaaaaaataaattaaggttcatcgattgcaaatgaaaaaaaaacgcgctaacaagtgtcacaatatgtcccttgatgtttggttgtgtgtgctcctgtacgaagaaaaagcgcgccaaaaaagtggcatgtagtagtctagtacttaattctgaaaaaataagtagaataggtacgcccctgacgcgtgcccttgctttcttccctgttttgcgtaggctttagcttgagaacaagaggcacgtagccccttgcgagggttcagggcgagtttgcttgaaagaatcaacaaaatcgatcccccccaggccactactcggccgctcaagcaaccttgacctctcgctcactcttccaagcaaccaatgcagttatcctaagctcccagctgctgctgctgctgcttccatgtcctcgccgtctctcctcgctccctcaccatcgttgtggcttctgttttctgtctacgcgcgtccagcgatgccgtcgtcgtgcgtgggcgagaccggcctggtggccatggactgcctggtggtgtgctgctgctgcccgtgcctggtgctgcaggcctccgtcttcctcttcgtccggctacccaggaaggtggtcgtgaagaccaagagggtcatcctgaggcggtggcacaggagaaggccaccggcgccgtcaagcgcagccgggctgaagctggccgccctgctggacctggacgacgacggctttgaggccgcgttcggcatgggagagaaagagaggtgcaggtgcttcgctgtcggcggcgacggcggcgtcgacgtcgacgtcgacggcgtgtgggaggcgatcattgagcaggaagggctcttctggttcgggagcttttggggccggcgtggggcggcttctgaagccgatgatcggatggatgggagcttcaggttgcctgtggcgctagagcgggtacgtgaataggcggctaaggtttttcgattcacgcagcggtgtaaatacgcgagggatttggtaattagccaaggggctcccattcagagttccgctggtcgtggtcggcatatatatttatttactcgatgactcgatcagtcaaatgcatgtacataatagtatcaacatgccagaaataatggggtgttcccggcagaatgaccaatatcacaggtaaatttagatatgaactccattgtaaacggtggctggctggctcctggctgtgcctcggtggcggtcagccggtcaatcttttgcggatttgacaaccgacgacggctagctgtgctctcctgatgattggatgacgccgtcgtcacgcgatataatacaccaccagccccggtcctatcattttgaggcctcaggcgaactaaccatagtgcaccctctaaactatataaaaaattntatgatatgtggcgaagcatattagcacttcgtaggtaaataatgatatgcattgaaattagtttttaaaatatctaagacgctagataatatacatcggtgcaaactagcacctcgcaggttaagaaataagaacaatggtcgctggataacctgaatccttattgctcgagcgtgcgtgtctagagcccagcgtagcaccctagaatcctactggcagtgggccacgcgtaccgcgtgatccgtgtgcgttagacgtccgcgtgcccagccctaccggtctgttagctacctatactattttactacttgcgtatagctcgtgctaacgctatgtttctgggaaggggtggatgacgacgatggtggcaggaggaggggttgacagcagtggggacacgagaagagagggatgaaggatattcaaataatattcaacgatctgaaccgttgattttgatgttacgttaaatatgagtgcaatttgtttagggatttaataaagattaagngtgtgtgagttatttagttggataaattttgtaaagtttaaattggtgtattatatagtgttatagatattaaatattagaccctattaattttgggccctcgtcgtcgcctctgtcgcatgtgccagggccggccctgtataccaccgaggtccagaaagaccaggaaacgtagtgcgtacgagctcacttggaaaacagcaaactcgactgatcggtttccccgacacacacacaaagtcgcaactgacacgataatcacatgaccctggagacgaaaacgagtttgactggatcactggaagaagcgatcgcgtgcgttcctcccaaggaagtagggatgaaaacngaacggtaaatttccgtaccgtctcgtttcgaataatgttttttcccgatcgttttcgaattgttcatgaaccgattaaaaacgatataaaatgatttatctagttttttttgatcgttttcgtatttttcgtttccgagtcgtgctaataccgttttttaccgttttatataatatgagatagatctagcatataatttaattaagttatagaattttgttgtgtttaagtgaatgaataagagaaaagcaaatgttataattactctaactaatatgaatgacgaaagagttatttgtgtatttctaaatcttaaaaattaggcaatacatcactttattatgtttttttataaaactacaaaatagttatttttccgactatagtttatcgttttcggtcgatttcgaataaccgacaattctgatcccgtatccaaca

SEQ ID NO: 5424 - DNA, 1586 bp, Zea mays
ggcaaggcttctccatctggcaaccggggaccggacgatcaactcatccgcgcgactccgcttcgtcacgcggcgtcgccggcctcctcccgtgcccgtggttcctgcagtgcgcagtgcatctacgaaggtgtccaagccgccgccgaaaccgaagcgaagagccaagtcccctatccccaagcgcgtcatctcggacgtgttcaaggaggcgaaagctgccaccaagaggttctccagcccgcagcggcagaggaagcccatgtccccgcggtcaccagacgacagccctccactcggcttcgcctcgctaagagcaccgagcaagctgaagatcaataccagagcatcctcatggccacgaacaaaccttgacagtggaccggcaagagttgctgcgccggagatccttgagaggtggacggtcgatcgctccgagttgctcatcggccatagatttgcatccggggcctatagccgattgttccacgggatctacaaggaccagcctgttgctgtgaagtttatcaggcagcccgacgatggcgaggacgacgaactgtctgctaagcttgacaagcagttcacttcagaggttacaattctggcaaggctccaacatcgtaatgtcattaagcttgttggggcctgtaattgcccgacggtcttctgtgtcatcaccgagtttctgtccggcggttctctgagggctttcttgcgaaagctggagcgtgaaactcttcctttggagaaggtcatttccatcgctctggatatcgcacgcggcctggaatatattcacctccaagggattgtgcaccgtgacatcaaacccgagaacatcttatttgatggagaattctgcgctaaagtcgtcgattttggagtggcgtgtgaagaaaaatactgcaatttgttaggcgatgatccaggtacttatagatggatggcaccagagatgtacaagcacaagccatatggccggaaggtcgatgtgtatagctttggacttgtcttgtgggaattggtcactggttcactcccttatcaagatatgactccgcttcaggcagcttttgcggttgttaataagaacttgaggccggctattccattgagctgcccagcagcgctgaagcttctgatcgagcaatgttggtcctggcaaccagaaaggaggcctgagttccagcaaatagtttcagtccttgaaaacctcaagacagttcttgaaagagatggaacactcgacaagatcccaagctcgatctgccaggccctggaacccaatgaccagaacaagaagaaggctggcaactggatccagaggctgtcatacgctcaacctgctttctccggacctccacccccaaagttactctagttacacgtcttcttgttcttagcagcttggtatctggtactccagatagcaagtgtgtaaattgaatctttcttggtttcgctgggagaccagagatttcttcatggtatatactcggatacagtacatacatcatttttgggggcagtgggagcacagtaaatacttgtttggctatcttaaccaattctatcttgatgat

SEQ ID NO: 5425 - DNA, 1250 bp, Zea mays
cccacgcgtccgggccaagatgatgctgttgtggccatatctcgtgcagtgaagagagcacgtgttggccttaacgatcctgatagacctattgctacgctgctttgctgtggtccaacaggagttggtaaaacagagctcaccaaagctctagcagctagttattttggatcggaatctgctatgcttaggttagacatgagcgagtatatggagaggcacactgtgagcaagctcataggctctcctccagggtacattgggtatggtgaaactggtactttgacagaagcagtcaggagaaaaccatttactgtggtattgttggatgagatagagaaagctcaccctgatattttcaacatccttctccaaatatttgaggatggacatttgacagactcacagggtcgcagggtttccttcaaaaatacgttgattgtcatgacttcgaatgttggttcaacatcaatttcaaaaggaagacagagcataggtttcttgaaggaagataccgagtcaggctcatacttcgcaatgaaatccttagtgatggaagagctcaaggcatttttccgtccagagttgctcaatagaatcgacgagatggttgtgttccgtcctctggagaagactcagatgctggccattcttgatatcatcctaaaggaagtcaagggccgacttttggccctcgggataggtttggaggtgtctgatgcaatgaaggacctgatatgccaagagggctacgacaaaagctatggcgctcggcctctgaggagagctgtcacccacattatcgaggatgtcatcagcgaagcgattctttttggcgagttcaagcccggtgacacgatactgatggacatcgatgcagaggggaagccatgcatgggccatctggaccaacagatcgtccaggtctctgacccaacacgggcaatctgaagctgtgttggaccttttccagtgtagtagattagggatctaaatcttttattctttcaagatagagattattaattctttgttacgtagatatatagagtagtatttcattatgtatatatatcaaccagatgatccagataggggaatctggtcagtcattggagttatttgaaattttcatccagctgtatgtatattgttgaattgtttctgattcaactggccatatatatcatcattaaactatcttcatcggcttacgagcctagttctcctctctctctctctcctcgtgc

SEQ ID NO: 5426 - DNA, 1211 bp, Zea mays
gcacgagaccattacctagaacatcctaatcgaaaaacccaaacgaatattatagaagctggctgaaaagctgagtgtttggcagtccgcagtagcttttggtggcctaccgcgtggccgggtgggatccattgtcggttgtcgcctctgaccgtaccacctctgttacctgcaccgccgctccgttaaatcgcggcccgatcgccgatgcctccccgccccgtcccactattctctcgcctgcgcttccgcctcccgagttgcgccgccgtctccatctccacccctccatcctccgcggcgcccctgcactacggccatcgcactcccctcgctagcccttttcctctgtccccaccttgcccgcgcatcctccgtgcggccgtcgcggtttcttcgctggatctgcgcccgatcaccggcgggttcgcgctattcagcatggctgctgcctcctccgccacctccgtccacgacttcaccgtcaaggatgctagcgggaaagatgtggaccttagcacctataaggggaaggttctgctcatagtcaatgttgcatctcagtgtggcttaaccaattccaactacacagagctgagccagttgtatgagaagtacaaggaccagggttttgagatccttgcattcccatgcaaccagttcggtgggcaggagcctggcactaatgaggagattgtccagtttgcttgtactcgcttcaaggctgagtatccaattttcgacaaggttgatgtcaatggtgacaatactgcacccatttacaagttcctgaagtccagcaaaggtagtctctttggcgataacataaaatggaacttctccaaattcttggttgacaaagaggggcatgttgtggagcggtatgcaccaacaacttccccactgagcatcgagaaggacatcaagaaactactagggagttcttaaaccttgtaattggattcagtagccctaccaaactgctgctttgcatcgagcacctgatgcctcagtagcgttttaataaagttgtttttataaccgagatgttttgtatttcttctgtattccctgctttgtggtaaatggcatgtaataaaaatgatgcaatccacgatttatcttgaaaggttatgtatccaggttggttgttatgagataaaaaaaaaaaaaaaaaaaaaaagggggcatatcttgcgtacctgcctacc

SEQ ID NO: 5427 - DNA, 2492 bp, Zea mays
  misc_feature (2411)..(2415): n is a, c, g, or t
aaaatcaactcgagcaaagcagctagctagctagcgctagtaccatcgtgcgagtgtgagcaagctactgagagatctcggaacgttgcttgacagcttgagtaggtaaataatctatggcgcgccgacagtggagcagcggcggcctcgcggtcgcggtgctcgccgtgctgtcgtccgtgctcatctgctcatcgggccacccggtgccgggcgggcacggcggcgggctccccctgcagccgcacttctacggccacgcgtgcccgcagatggaggccatcgtggggtccctcgtggcgaaggcgcacgcggaggacccgcgcatggcggcgtccctgctgcggatgcacttccacgactgcttcgtgcagggctgcgacgcctccgtgctgctggacgccgacggcagcggcaggttcgtcaccgagaagcggtccaaccccaacaaggactcgctccgggggttcgaggtcatcgacgagatcaaggccgcgctggagcacgcctgcccgcacaccgtctcctgcgccgacatcgtcgccgtcgccgccagggactccgtcgtcctgaccggcggacctggctgggaggtgccactggggaggagggactcgctgacggccagcctgagcggctccaacaacctcatccctgctcccaacgactccctccccaccatcatcggcaagttcgccaaccaaggcctcgacatcgtcgacctcgtcgcactctcaggggggcacaccatcggcgactcgcggtgcgtgagcttccggcagcggctgtacggccagaacaacaacgggcaggtggaccggacgctgaacccggcgtacgcggcggagctgcggggccggtgcccgcggtcgggcggcgaccagaacctgttcgcgctggacctggtgacccagttccggttcgacaaccagtactaccacaacatcctggccatgaacgggctgctcagctccgacgagatcctgctcacgcagagccgcgagaccatggacctcgtccaccgctacgccgccgaccagggcctcttcttcgaccacttcgccaagtccatggtcaagatgggcaacatctcgccgctcaccgggagcgccggcgagatcaggcacaactgcaggagggtcaaccacttctagcttccatggagtggccatccgtgcagtggtgttcttgctttggtttcatttctggatgcatgcgtcatctttcatacttggatttaagtgtgcagtagtcgtaaatgattggaatttctgttttagtttggtgcccattcgatctcgagtcgattttcactcatgtaatttgcaaatcttgtacgaagaaatgatccaataaaattcagcatttgtgtcaaaaaaaaaaaaaaaaaaagtaaggatggtatgcatgggtaccgcggctttttccctttggattttacactcagtcaaaggcagactcagcccaagatctgggggggggggggcacgtctaaatgggggcataaatagaggtctacttatcaatgtatctataagtaaataagataggggtccacaaaaccagaaaaacgagtggagtttgtgcccccactcgccacaacgtaggtccgcttctccttctcccctagtatgtacactttgctaagttctacctttgtctcattggactgttcagttttcgcctcaaccgacaaacgacgcttgaccctgtgctatacccctaccaccctcttgtgaccataccttattacccgatcgaccagccaacgctctagcctctagaaggccctgaccggccatcgtctctcaggtctctgctcattgagagcacctagaggggggtgttgaataggtgatcctgcaaaattaactctaaccaacacaaacttggtttataataggtgttagtgagaactaaaaccaagcaagtagagttggaaaggagaagagaactcttcacttgattgctcctttaagatgagtattaaacttaggagcaataatgcaagtgaaatatgataactctttggaagacaataattgcaataaaaataaatgcacaatagacacgacgattttatcctgtggttcggcaaaatgtgtactccacgttgtggtgacctcctttggtcaagggttgcactcaacccctctcaaatgatccaaagatcaaacttgagtatcatggttttcttccttatatcaaatccctttgtgaggaatctctataagttggagccgctcatgtcttacacaaatgatctcaatcaaagcacaagagtaaggagggagtagagacacaaacaagagtacaagaacatcaacaccacacacacaagcaaaggagaaaccacaagaatcaaaacgacatagtttctcccaagaaaacgctcagttctcgctagaatnnnnngaaagcgtggttgcattgaattgaagtttcggtgtgctcttggtatgcttgggttacagctccatgtgcctaggggg

SEQ ID NO: 5428 - DNA, 1711 bp, Zea mays
  misc_feature (1580)..(1602): n is a, c, g, or t
  misc_feature (1640)..(1686): n is a, c, g, or t
  misc_feature (1694)..(1700): n is a, c, g, or t
acattcattgggtacctccgggccggccgccacttctgtagctgtagactgtagttctgttcctcttcctccccactcactcctgcgcttcctcgccgcgcggttccttctccctgatcctcctttggcttcgcggttcatggcgatgtggagggccgccgctaggcagctggtcgaccgggcgctcggctcaagggccgcgcacacgtctacaggcagcaaaaagatagtcggggtgttctacaaggccggggagtatgccgacaagaaccccaacttcgtcggctgcgtcgagggtgcactcggcatccgcggctggctcgagtcgcagggccatcagtacattgtcaccgatgacaaggaaggccccaactgtgaactggagaagcacattgaagacatgcatgtcctgattaccaccccattccacccagcttatgtcactgcagagaggataaagaaggcgaagaatcttgagcttcttctcacggcaggaatcggctccgatcatattgatcttccagcagctgctgctgcgggcttaactgtggctgaggtcactggaagcaacactgtctctgtggcagaagatgagctcttgcgcattctgattctgctcaggaacttcttgcctgggtaccaacaggtagttcaaggcgaatggaacgtagcaggcattgcccatagagcttatgatcttgaaggaaaaactgttgggactgttggggctggtcgtattggcaggctcttgcttcagcgtcttaagccctttaactgcaacctgctttaccatgacagacttcagattgacccagagcttgagaaagaaattggggccaaatttgaggaggacctggatgctatgcttccaaagtgtgatgtgattgtgatcaacacacctcttacggagaaaacaagaggcatgtttaacaaagagaggattgcaaagatgaagaaaggtgtaattgttgtgaataatgctcgaggagcaatcatggatgctcaagcagtcgcagatgcatgttctagcggtcacattgctggatacggtggtgatgtgtggttcccacagccagcaccaaaggatcacccctggcgctacatgccaaaccatgccatgacccctcacatctctgggactacaattgatgcgcagctgcggtatgcggatggtgtgagggacatgctgaataggtatttcaagggcgaggacttccccgtgcagaactacatcgtcaaggaaggccagcttgccagtcagtaccagtgaccgcgcgagatgttgctgtgccgtgtaggcttttctggtgagaagctgcgaggaagaaactcctgttgcgtacttgcgttactgtatgagtagctctgagaaacctgtcagcggccacctgtaataaaagaatgccttgctggtatctcaccgtggagatcaataagtctcttttttttcccttctctgtcactgaactgcatgcactgtcttttttcggctgtgacaacgcaaatggtaacgaactgcatgcgctaaaaaaaaaaaaaaaaaaaaaatttaacaagcacatggtaatgaaatcagaaannnnnnnnnnnnnnnnnnnnnnnagagtgcctccggcggggtaacctgttttcaaagagannnnnnnnnnnnnnnnnnnnnnnnnnnnnnnnnnnnnnnnnnnnnnncttctagnnnnnnnccccgggccct

SEQ ID NO: 5429 - DNA, 1169 bp, Zea mays
gcacgagaccattacctagaacatccgccgcccgggatggaagggagacaggcgaatagaggacagctgagctgcagcatcccgtccaacagcaggaccagcgagggtgtacctccgcctcgcgagtcgggaccatgtggacgggcagcccgctgctccgggacgttggcgccgccgtgctcacgggagtgggcgcggctgccgtgctccgcttctgggaagagatcgccaaccgcgccctgctggaccagaaactctgcaggaaactggtgcacataactgtaggattagtgtttttccttatgtggcctttgttcagctcagatgatgtgtttgctccatctctcgctccgcttatcatcatcatcaacatcatgaaagtgacagtgattggacttggtttcgtgaaagctgaaggtgtggttaactccatgactaggcatggagaccgcagagaacttctcaagggcccgctgtattatgcctgtgctataactctgacaacaatagttttctggaggacatctcccatctcaatcgcggtgatctgcaatttgtgtgccggagacggtgttgctgacatagctgggagacgattcgggcatgttaagctccctcacaaccctgaaaaatcatatgccgggagcatcgcaatgttcttggcaggtttcatcgcatcagtactgttcatgtgctacttcaacattttcgggtttgttgagaagagctggaccatggttgctgcctttggtgtgatatccctggctgcagcagttgtggagtcactcccgatcagcacacgccttgacgacaatctgacggtttctgtcgcatcagtgctagttggcgcccttgttttctattccattggagccagaaacctgtgctgcatgagcagcgaagtcaggagaagtatcccagcaaccgttggaatggtgtttgcaggcagcagctgaaacatgtagccacagtccaggagcagagttgagcagaaagtgcagagaaaggagttcttcaatcctgatgtgtgtgtatcttgtactgtaaccattttcctgtctaagcagacattcttgtaactttattaagaaagaggtaaagcgagaataagttcattagggaaaacagaggatgtgctctcataagcaaatgcaaaaaaaaaagcggcc

SEQ ID NO: 5430 - DNA, 921 bp, Zea mays
gtcgctgatgtgtggtcatgtggagtaacgctgtacgtgatgctggtcggtgcatatccgtttgaggacccagatgagcctaagaatttcaggaagacaattcagagaatattgggtgtgcagtactcaattccagactatgtccacatatctccagagtgccaaaatcttgtctctaggattttcgtcgccgacccagccaccaggatcaccatccctgagataaggaaccatccatggttcttgaagaacctgccagctgacctaatggatgacagcacgatgagcaagcagtacgaggagcctgagcaaccgatgcagagcatggatgagatcatgcagatcctggccgaggcgaccattccagcagctggtccccgtggactcaatcagttcctgaacgacggccttgacctcgacgatgacatggacgacctggactcagataccgatcttgacctggaaagcagtggggaaatcgtgtatgctatttgacagcagcgaggcaatgcgtatcatcagtcgtgctcagatcgtttgttgcgccgcaggttaccgagataattagagagacaggggggaggtatctgctggagatgctgctcgtgtctgatgccgtgatgccccccttttttttcatcctgttatgtttggctgttgtttggttgtggtgcacctccagtgttttacaacagtttggcccttcggaattggttgtgctagaacctcgtccatctaagaagaccctttgtttttgcatccccagctaagagacagtgaagtacttgtataattatactgtttgtgtcatatgtatttggtgtaggaaaataaagaaactccattgcccgttcttgtacaaaaaaagacccacgaagcggccgagaaccctctcaattttagtgtctttttggctgctgt

SEQ ID NO: 5431 - DNA, 1289 bp, Zea mays
cattgggtaccgcccgggcctccctcgttatttccgggctccctcctgtgtacaccactcccgccccgcctaccattttatccccgcctctcctggcctctgccgccccgtcgcacagaatcgcttggtgcaccctgcgagggcctcctcgaaaccctagcttgcccagcccctccgggccatgggcaagtacatgcgcaaggccaaggcttccagcgaggttgtcatcatggatgtcgccgccgctccgctcggagtccgcacccgagcgcgcgccctcgcgctgcagcgtctgcaggagcagcagacgcagtgggaggaaggtgctggcggcgagtacctggagctaaggaaccggaggctcgagaagctgccgccgccgccggcgaccacgaggaggtcgggcgggaggaaagcggcagccgaggccgccgcaactaaggaggctgaggcgtcgtacggggagaacatgctcgagttggaggccatggagaggattaccagggagacgacgccctgcagcttgattaacacccagatgactagcactcctgggtccacgagatccagccactcttgccaccgcagggtgaacgctcctccggtgcacgccgtcccaagttctagggagatgaatgagtacttcgctgccgaacagcgacggcaacagcaggatttcattgacaagtacaacttcgatcctgcaaacgactgccctctcccaggcaggtttgagtgggtgaagctagactgatggattcagagggacgagagagcagcaggcatggaatggaactcaccccccgctccctccacaccaccccagcgttgtggcagaggcgcataccgtcgtgttagcttcgtttctgctgtaaaaaaaaacccttagtgttttatttagcatgtagccttaactggtcgtgtgttacagtacagaactgatgctgagttacaacaccctgatctgatccctcaactccaatgtaacccttaacagctcattctgtaaggaacctgtcaccctgttacctgttgctgaactaatgaagtagagctagataatgacgttttatcgtagttattattaataactcctcccctgtggtggcgcccctgaaaaaaaaaaataaggaactaccatctgaagatgacatgggcaacaaagaaagtttgtcacaatgcacttggtgactggaaaaataaaaaaacaggggggggccgctttaaaggatccaagcttacctccgcgtgcatgcaacgtaatagtttttttatagtgccacctaaat

SEQ ID NO: 5432 - DNA, 1866 bp, Zea mays
atcaaagatcggctgcctgtccgctgttgtctttttaattgcctgtgcctgtgctgcccccattcctttctcctccagcaagtaaaccccgtttccacaacgtcaccgcaccgccgtcatgccgaccgtaagcgtgaaatggcagaaggagctctttccaggcatagagattgacactagccagcctccgattgttttcaagactcagttgtacacactaactggtgtgccacctgaacgccaaaaaattatggtgaagggaggaatattgaaggacgatgcagattggtctactttgggagtgaaagatggccaaaagttgatgatgataggcacggctgatgagattgtgaaagctccggagaaaggtccagtgtttgttgaggatctaccagaagaagagcaagtgattgcactgggtcacagtgctggtctttataaccttgggaatacatgctatatgaattccacattgcaatgtctgcattctgttccagagctgaagtcagcgctgctaagctattcagatactgtaagaggtaatggcattgaccaagcttctcataatttgactgttgctactcgtaatacctttggtgatcttgatcaaagtgttcgccctgttgcacctctacaattcttgcagacactgcgtaaaaaatacccgcaatttgcgcagcagcataataatgtctacatgcaacaggatgcagaagaatgctggacacagttggtgtatacgctttctcaaactcttacctcagattcaagtgaatctgcagctcttccgatgaagcaactatttgggatagatctcgtgagcagggtccactgtgcagaaagtggtgaggagagcatggagacagaatcagtatattcccttaagtgtcatatatctcaagatgtgaaccatcttcatgagggaattaagcatggcttgaagacagaacttgagaaagcttcacctacactgggtcgaactgcagtttatactagagaatcaagaataaatgagctgcctaggtacttgactgtgcagttcgttcgcttcttttggaaaagggaatcaaaccaaaaggcaaagattttacgaaaagttgattacccactggaattggatgtttatgaattttgctctgatgaactgaaacagaaactccaagcacctcggcagatgctgagagatgcagaaaatgcaaagtttggattgaaagcacaagggaaagctagcggctttaaagaaaatgagggatcatccagtagcgctggggaatcatccagtatggacattgacaaagctgagtcttctctaccaaagaaacaattaactggcgtctatgatttggttgctgtcttgacacacaagggaagaagtgcagactctggccactatgttggctgggtaaagcaagatgacggaaaatggatcgagtttgatgatgacaacccaaacatccgcaaggaggaagacattttgaaactatctggtggaggtgactggcacatggcttatatctgcctatacaaagcccgcatggcggagttgaagagttaggccggagtggttctacatttctgtgccgcgaacgcaacactagtttttctgcccatgagtgatcatggtaattattttttccagttcgtaaagtggttactgtcgaatttgcttcaatgcggttggccattattcactgggatatgtatttttaggatttcaaatctagtacattttgtgttgtcaaaatatagaacgaagaaattcagaggaaagcttctgccttgacagtggatctgattgatttgcaccaagtggtttcatccgtgtcttcctaataatagtgtatttaaaaaaaaaaaatcaaaact

SEQ ID NO: 5433 - DNA, 6552 bp, Zea mays
  misc_feature (3114)..(3114): n is a, c, g, or t
  misc_feature (3179)..(3179): n is a, c, g, or t
  misc_feature (4432)..(4432): n is a, c, g, or t
ctgttttgttgtcttccatttagcttataagttttcactgaaagcatgtggcctactataacttgaactactagcctgattgtatctgtgtgcttttagcagccgatgtccactgcacaacgaagcgataggtcttctggcagtaaggtgagaggaggcccttgtctgttgcatttctgatacaatgatgtctttgagttgaacgggttttcatgtgtttgtgttttccccccttaaaaaaattgcagccatgggagatgcattcgtattcacaacagaggcctggttatggatccaactcccagttgagtgatgatggatcatactctgatgcccaggacagctatgctccttcctatcaccagaatggaaaggcccctgattttcaagcggatgaacctaggcctttgacttacaacactggggttgaggaaagaccgccaccgcagcgccgctgggtgccccctcagcctccaggtgttgcgatgccagaagcagcagctgccatacgtcaaccaaaggcccttccaaagcagccctccagcgatgcctctgaggcagctggtgagatgcaggtgaatggttcaagtgcatcggatgctgtgactgaggttcctgttaatggtgctactgcaagcgatgctggacgcagtgagatccaagaacaatcagtggcggcctaagtgaaaccaagaccagctaagaactgggaagcaatctaagagagattcaggatctctagtacatctggggggtttgtcatacatctctgaataacgtctgtatcagaacagcggggcaaccacaccgatgggtacccgtaataatgcaataagtagcagatagtttctgcatttagattaatgctacttgtacacaggagaacatatcaataatatttttttggctgttcgattgagggtgcttaaaaagtgtgcttgtgaattgttgtattttgatcttgatcttgtgatgactagcaatcgcaatggaccaaatggagatggtcgtttgttttcttgttgctgtctcgctttattccattcaggtgttgttttttcagggtctgccaagaatgagaatgaatccattcaggtgttctccaggggctatttcctgcgtttgccagggatgagaatgaatggcggcgtacacatggattgttttcgtcagttcatgatctccccagacccttgtcatcgttcaaattcagttggatatttcttttttgttttgttttgttttgttttggagtacaaagtgttaacttatgacaggattccaattattgttgttgtctcaggtcaaaggtgggataccaccagcaaaggaacattaccccgacagaggatgataaaggatgctagtgcggagtaccactagatagagcagcgatgcatgtaggtctaccatttacacaaatgcatggggagagaaaccagccgctgaactggtggatttcaggatccatttacaaaagactgacgatcagcagctacaaggaacatgggtcagtagctgaacgacctagatgcatcctaaccatacagactggtcagtggtggattgcatgatgatctgtagcagatgcacgctgcgcttgcagcaccttgtcaaccttggcaagaagatgttgcatttctcccacaagactgagactgtccacggccggctttgcattcgcttcttgaggtgacttggctttagacgacaaggacaagatcatcttcccaagattgttcctaatatctgtgagagggagctttggaagaggcgtgatgggagggagatcctggacggtcggtgctgcaaatgcgccgccaagagtcgcggcacagctcaaggcgctctctgcttgagccctggtggcgaacaccacgcgcgcggtgtgcttgttcttgtcttgggtgatgctggtctcggagtcgatcacaaagccaaacctgctgaatgtggagaggaggtcctccctggagggcagcggagttccctctgccaagtccagcacaagtgccacaggattcccgacatagctgtgctgcccaacggtcttcatcgtctttctcttcctcttcttggtcaaggacgatccgtcgtctgggcctgcattaaggttgagcatcatcttgcggccaacaccagcagctgatggaggcttgctgacaccatcgtcttgggaggcaccgcccgcggcagcatgtgaatcgggatggtcgtcgacgaaaatgctgttcctgttcctgctatccatggccatgaaacggagggctgccgcttccatccccttaccctgcccgagcgctgaggctcggagagtggggagcgcctccgcgccggagacatggggttgcccctcctctcgctgcttctggctgccggcggccttcttttcttggaggacgcctgtgtcggtgtagggaggggagaggtacctgcttctcttgcgctctctcttggtgacggccagggctgcctcgtccacggccggatggatcagctggctctggctgccgccgctcccctccatagccatggaaacgggcggcacgcggcagctggggcggccaggggcgacgggacggggcgggacgtggcaggacaagagtgaagtcaccgcagttgagtgcagggcgccagggcggacccgccactgtttggatcgagttttagggggttggaatcggctagagctgttaaaggctttgctttttcgattaggatgttctaggtaatggtctcgtgcatggattagatgggattggaaaaaattgagaagaagtttgacttatttgagattcaaactcatccaatctcactcaatccacatggattgagagctaaccaaacatgccctaattaaaatttatataaattagagaatcaattcggttaggaatcgttccgactcatcaatccggcacaacgaacaagaccttatggggttagaatcgggctttgcttctcaacctatttgtatgagaatcgtttatatgaaaatctctcaaatcaatatgaatgtacgattcgtcaagtcattgtaaatagagaaatctatcaattaagctctttaatagcctaaaccgacaagagctccataagagagagagaggaatngagtacttctcttgatataacatgcgagacaattacatacataaggtggtgaaaataaagtacanatcacatcggtgctttgtggttgcattgtggtttagggttacagaagatatatactagtttcctctggtagctagtgcatgcttaatcatcatatgcgtgcgaggtgaatggggcatccgtttctgagcctgggaaacattgcccacttctcaaggctggggtcgtcgtcggccatctcccatctccatgttgtaacaaggtggtgcagaaaaatgagcatcatgattttggcgaggttcatccccaggcaggttctcccgcctgctccaaacaccaggaagctgtacggctgcttcgtgtgcatgctatgcccgcctttgaatcttgaaggatcaaacatggtggggttgtggtagagcgtcgcatcgtagtgtagggccctcgcatcaatgttcacaatccaccccttgtggatgtggaaccctgcgacctggcagtcctcgagtgctacccttggaaaccaggaaactatgctcgccatcctcaatgattctttaaccgtctgcatgcaaattaatgcaataagcagcaagaattaataacatttaattaatttccagcttgctgatagagatgcatatgtatgttgtggatcggacgacggacagacaccatgtatgcaagctccatgctgttgagatgttggaggagatcatgatctgcctcctcctgctgctgctgctgcttcagctccagctgaactgactgcatcaacaacagattcggattattcgacatttatctggtctggtgtgggtggactactgatgatgattattgacccacccaccctcaaggtttcttggaagactttgttgtcagccaggtacttgaccatccatgtaattgcgctcgctgtcgtcacctgccctgttatcgttgttaatttataataatacgtaagaagaagaagaacgtgctgcatgtaattaaaagcaagcaagcaagcaagaaattatatattttttttgtaggttgtcgtaccggcaatgatgagcgtcaagatgttatcgagaatctggtcgtcagtgaggaagaggtcgtcgtcgtcgttatgatgagctgacgacgatggtaaaaggtgttgttgctgctggctccgcctcctcctcctactcctgagaagaagaaggctctgcagaaagtcgtcgccgtgctgctgctcctcctcctcctcctccatgtccatgatctgtctctgtcttgatcctatctcttgcctgagcacgtccatgatccttttcctggcccngaggcccgcgtggaacctggtccccggcagcctgagcgggaacgccagcatggcccgcgtcacggccagcacgtcgctctgcagccgcctcctcgcatcgggccgcagcgtcctcccgatgagcatgtcgcagatggcctcgaatgttaggtccagcgcggcgtcgagcaccaccacggccccagtgctgctgctccagtcgcgcttcatgagcctccgcgtgaggccgtcgaaggtggcggccagggacgccgtggcctgcgcgttgaagaggggcgccacggcgcgccgcagggcgcggtgggtggcgtgggaggcgcacagcaggctgtgctcgccgaggagctccgccacggtgcgcacgtagcgcttcgagaagccggctggctcggcgcccaggagcgacctggcggcgtcggccgacgagacgaacacgtgggtggcgcccaagagcgaggtgcggaagcaggggccgggaccgtacctgcggtggcgagcctccacgaagtggtagaagcccctgccgctgctgttggcggacaggaaggccagcgtctccacgacggaccaccaccagcggctaccccttctcggtggtggtggtggtggtggtgctgctgctgctgctgcatgatcattcttcaccctcctcctcccttggaatttgatcaatcgtctgatgatcacgacgcagtagatgatgaccgctgctaagaaaaagaaaaagaagatgctgctgctgctgctgtggctttggcaggctggtggtgcttggagttggcggtgcatgtcgtccatggctaggaaggaggagggataggagtcataggacagctcctgcccatgcatcatgctctagtgtaaaagagaagaagatgagcccgtcgtcggtcacattcgcaatcactcactccacttgccatcgcaatgcaacaggagcagccaccagctccggccggcctcccggcagtacaagtagaatagatgccatcaggatacacgacgactaggacactgctgctggtggaggatccactgtccaccccccacccagctacctctggaatgtcctgtccatattcatagcatattagtgtagcgggcgtactgtgaaggcaggcgcggcgtagtggagaagactgcgcagctgcctttcctgcgatgtgttttgcacgtacacatgtactagctggtgcacattggacgtaattggttggtgggttcagccgcgccgggctcacgccggtctggccagccagcgaaactctcgcctccccttccccgctgatgcaggtgacccggtggaaaagcgtctctcgaaccaatactcgtgcaggtcagcctccgcaatatcactgcacactattttcgtcggttaaaccctgatcgtcgaaaatagtgtcttacttttggcagctgtgagtggccgtcgaaaacaatgttactttcgacggctaagtttcacggccaccaaaaaaacttagggcttgttcggttattgatattatatatgtattggaatgtattgggtgcaatttaagatgaattttgacttgttatagatttaaatcggctcaatcccacccaatatatatggattatcaccaaaacgaacaagcacttatgggattttaacatgtagccgaaacatttcttctctctttcctcgctttccttctccctccatcctctgatgtcgtctgatgtcgtgactgctgctcccgccgcatcccctggctcgccccgcccacgcgctgccggctcgtggttccacctcccgatcctgactcgtcgtgcagccgctcgctccggctcaccgtattgtcaaccgcacgcgatgttaaacttttttttttgcatattttattgtttattttcggcaaccgttttttgtttgccatcaaaaatagtgatcagcagtttatttaatgtttgatagtgattagcagtttatttaatgtttgattgtactattttttattatttatgattagttatttgtttatgcatttaaaacacaattaattacacatttagccaacgatacgttcaattattgtttgattccattaactaatataatgttgatatgccttattacttagtttgatttgattaat

SEQ ID NO: 5434 - DNA, 1429 bp, Zea mays
gatcatggctgattggtcgtcctcgtccccggcttgtcgttgagcagaccactcgtgactcgtggcctcgtggggtgggggcagaaaccagccctttctgtcctgtcagctactacccactggccactgcactagccgtctgcggagccgagtgttcctttctagccttcacttctcagcacggcagccttcgacccccgactgcagccgccagccgcgccatggagcaagccgccatgccgcaggttccccgcgtcaagctcggcatccaggggcttgaggtgtcgaagctggggttcgggtgcatggggctcacgggcacctacaacgcgccgctcggcgacgaggccgtggccgccgtcgtcgcgcacgccttccgccgcgggatcaccttcttcgacacctccgatgcctacgggccccgcaccaacgagaccctcctggggaaggcgctcaagcagctgccgagggagcaggtgcaggtggccaccaagttcgggataggtcagggcgccgctggcatgaccgtgtgcggcacgcccgagtacgtacgcgcctgctgcgaggccagcctgcgccgcctcgacgccggctacatcgacctctactaccagcaccgcgtcgacaccaccgtccccatcgaggatacgattggtgagctcaagaagttggtggaggaggggaaggtcaagtacatcggcttgtcagaggccagcccagacacaatccgccgtgcgcacgccgtgcatcccatcaccgccgtgcagatggagtggtcgctctggtcccgagacatcgagcccgagatcgtgccactctgcagagaattggggattggaattgtggcttacagtccaattggccgtggattttttggtggaagaggagtgacacagcaagtttcttctgaatctagtctgcaaaggcatccaagatttacaacagaaagcttggagaagaacaagcagatttacctgaaaatagaagatttggcgaagaagtaccagtgcagcccagctcagctagctctagcctgggttctgcatcaaggggatgatgtggttcctataccagggacaacaaaaacgaagaacctagatgccaacgttgactccttgaaggtgaagctcacagctgaggacctgaaggaaattggcagccagatacgtgcagaagatgtggctggtggaagacaatacaattcctatgcacatacctcctggaagtacgcagatacaccaaaaaagtgaagttctggtcctggaaaccttgtagcaatcacaggcgtatgcaaatgttgaactatttccctgcatttgagccggaatcgtacgatgatgcatcttgtgaacatgcggcactaataaatcgagacgaagaataatgtgttttccatcagtgattatgagcagatgatgatttttatccg

SEQ ID NO: 5435 - DNA, 3056 bp, Zea mays
  misc_feature (1535)..(1535): n is a, c, g, or t
gttcccctcccattcttctcgtacgcgatcgattgcgagttgcgcccctcgccctcgcccggtcgccccccccagtccccgaaactgctccgcctccacgcccgcgcccgctcgccctgaccacggcgatggccgccgccgccctccgctcctccgcacgccggctcctgcgcctcgccccggcagcctcgtcggctctgtccgctggttcccggcccacagccggggctgcgccgctcacgcgccccatcgccgcgctctcaggtggcaacaatcctatctcatggaaactgagacggttctacagttcaaatgaaaaacacttgcctgcaatatctgatccagaaatagaatctgcatttaaggatttgttggctgctagttggaatgaacttccagattctcttgtagcggaagcaaagaaagcagcatctaaagccaccgatgatagtgctggtcaagaggctttgaaaaatgtatttcgtgcagctgaggcatgtgaagaatttagtggaactttggttaccctaagaatggctcttgatgatctttgtggcctgactggcgaaaatgtgggtcccttacctggttatattgaagatgctgttaaagctgcatataatcgctacatgacatatctggagtcctttggtcctgaggaaaactatctaagaaagaaggtggagactgagttggggacaaaaatgatacacctcaaaatgcgatgcagtggcataggttctgagtggggaaagatctccctgattggcacctcagggatctcaggttcctatgttgagctaagggcatgatgggacgtctgcaggtaaccatggaaatcatcgatgagctgaggaagtctgtagatcagaatatgccagtactgcattttcctttcccctttctagctagcatggcaataacaatgagatcatcaaacagcggcgcggttgaaggaacttcagatactcccggcccttgtgtctgtgtctttgtctgtaataagaacgtgtatatgcgtgaaacctatcagttctgttattttttggcatgcgcctgacttcttgttcaactggtgtgagttgtatgctttgttcatgaagcactgatcaatgatcatatgccttcgcccgcaacagaacttccttcagcactgcaaaaatacagtgacctgccatttttttatgaaagggtttaacaatcactatgtgattagtgttcactaactagtggattgtagcatgttaaatcatcaattaaaaatgtgtcatgtacttaagatgatgtgaacatgagatttaatgtgtagttattgcaagaataatatgagtttacttgcccccgtttaaatcctaagatccacaataaattttagacataataagtgattaattctgaatacaaaattaactaaatattgattcagctaaaatagatatactacttgttatgaggtcgaaaaaggtggaaaaacgagtcatacgagttgcaacgaatatgggctaatcggatcagagtcagaccacaacatgcgnggtgcatacaagacagctaggctagatataggttgtacttgtatgccataagcaaaaaaatgctcatttcaatactatacaaattgaaggtgttatttggaagccttaaccactaggctagagatcatttcgatagaataggtgataggatgggttaactgatggagacaacttaagtggcctggaattatttgatacggtttatgaaacctatctctattttacatagtaatgtatcactagtacaaattctttctatatataatgtatcgagagcataactgaactgcataactgaactgtacttgcatccgactttttccgcttgattggttacccgcatcatcttgttctgactgcgtgcgttgactttatacgagtatatatttgattacatgtatgtggaagacccgaactatatgagtggatacaaaataatttattttaagatcatttgactgtctccatccatacggtagaaacgagggtattggcccagttaggctcacgcccacctggcttcgcacacccagccatccaatcatgtatttagattcttagccactcgatcatatttaacggacacaattcctcgacgtattgttagacatagatgcagatacggttcccttgtagcttctgtaacaaacgtgagagttctaaaagacaatctaatgaccgatggggaaaaggggaaaaagaaaagttgtattcgattgcaatgacaggacaatttagataaggttttttgtttagagtaaggggttagggcatgatcatcctattgttgtctctagctatctattagaattggactcatgaaaggggacttccctgactatcatgcaaccaaacatacataaagagtgcaaagcgtgtcctaatatactatatgtatatcattgattcatcgagcagagagcattggctcattgtggtgtaattcaacaagcaaacacaaaaaaataaaacatattgttgtgtgccaccaaccaactccaagcatattaaaaaaaatcattgcttactgctgcactaaggccattctaaatagatagttccatcacactgttttcaagactgccatgtaaatatctgtttaggaaatagtgcatccaaagttttgtccccataaaactttcttatcttttataaaactcgttcatatatctcttcattaaattatatgacatgtcatcttatttacttatgtaacatgtcatttaaagaatgaaactccttttaaaaatgacctaattagagtgaaggtgttttgtcctttagccaaggtccatggaaggctgtcactaatcctgactatgcaataaccgtcatcaaatgagcacgagcttcccttggaaattctaaacttttaataaatccaccaagctcgacaagaagccagaattgctaaaatcatctgtttgtagcttccatcacaccatcatttcctcatcacaataaagcagtaaggccaaaataactctcgatggttctatagttttcagagcatgaacatat

SEQ ID NO: 5436 - DNA, 1957 bp, Zea mays
cgcataatgttaatcaaattccatcttagggagtgtttgaatgcactagagctaatagttagttagctaaaaaaattgctagcggaattagctagctaacaaacaactagctaactattagctagactgtttggatgtcttcaactaattttagcggctaactattagctttagtgcattcaaacacctccttagtctggaagttgtttttttttctgaaataagtatgagggagatgttagttgtaaactgcacaatcgcctgctggcaattgatagttggctatttatctaaattccaagcatgccaataatctaatgcctcttgataagtgcttctgttaagttcgtgttattatttgttcaacaggccaggaggcagaaaaagaaaagctgatgcagtgaaggaagaaactacagagacacctaaaaggtactccttctgtcccaaattaaaattcgttttaggcttttaatggattcatacaataattgatgtatatgttttgtaggtgtctagattcgtcatcacccatttgaatatagacataaaaactaagagctaaagtgaatactaatttgggacggagggagtaagtaattgatacaaagaagtcgctcatgcatgtatcttttctgatactgttttctgcatggctccagtgatgctgttgatcatccaaagaaaagaggacgtccaaaaggtgtaagatccagcaatggcacacctagtaactcagctactccgagcacaaaggggaaaactgcgggcaagaataccaaagaaacaccaaaaactggccccaatcttataaaggaactcgagaagagctccaaggacaaagctagtgtatcaactgagacaaaggatgaattgcctaaagatgacaagagtgcaagcagacctaaggaggctattagcaaaggcaaggattcaaaagacgaaggcaagtccactgaaggaaaagctaggccaggtcggaaactaaaaaatgctggtactcctgcgggtgacgctgacaaagagaaggggaaggagaaagaagttaaggcagctgaaatagagcaggaggcaccaggaaatgcttctacaggaaagaagcgcagaaggaaggcttgaagctaacactgatggaacttcttttgtaaatggatgtgcaccttgtattattgagtgttaactcgaaatttcgtctgtttggtctctgatagttaggtgtggaagcaacatttgctatagctgtaatgctaggattaacatgtgttcattgtggtcagatgcatggtgcattggtgttgagctttgagcggaatcaacccaatgctcgctgtgaggcccatggcatcgtgttgtctggtggtgttgtagcttattgatgttctatttattataagcaatttaagcagtggattttgtagcaaaaaaaaaaaaaaagacaccaagggggcccccggtttaagttgggcacggatctcataggcccttcgataaggaagcagcaagggcctcaatctgattttttgtttagagcttgtatttggcacggctttagaaaaggcagccgtatcaaaacttcacttgagaaaaggctaatttctgctgaataaaagtgaagtcggagccttccactaaagtatttttctggtgaataattgataaatcggagtctttttgaaaatagaagagtcttaacgaacaaactcttaatatgacaattaaaatatatgatagtaacaagagtttcttcggttctcaagaaattttggatgtttctcccatggggcaccaaggtccaatgttcacattgcaaatgactgcaacctcaagttttatcagaaaggaagtcgtatacgtgtaagaccgtctccaggcaggttccgcggcaggcaggaagatgctcaatctagttgcttgtgtgctggtcggtgatcgtagtttgtcgctgcaggcatgcaag

SEQ ID NO: 5437 - DNA, 2208 bp, Zea mays
  misc_feature (2196)..(2196): n is a, c, g, or t
gccggccgggtcgggggcacggcgacacctcagccctcaggtagccccgtagccgcctagcagggccgtgctcgagaaaattaggagaccaacagcacgaagggggaaaaaaggagagcagaaatccccaatccctcctcacttcgacccttgctcggaatctccccgcagcgtccggctgaatccattcgattcactcatggtaggcttcgtcttcttctgctgattcgctggatcgtctccaccgacgcggctgcgcccacacctgccgtcacagccatggagccgcgcatcggcaacaggttccgcgtcggccgcaagctggggagcggctcctttggggagatctacctcggcaccaacgtgcagaccaacgaggaggtcgcaattaaactggaaaatgttaagacgaagcatcctcaattgctttatgagtcaaaattatacagaatacttcaaggaggaactgggattccaaatgttaagtggtttggcgttgagggtgattacaatgttttggttatggacttactgggaccgagtcttgaagatctttttagcttttgcaacaggaagttgtccctcaaaactgttttgatgcttgctgatcaaatgatcaatcgagttgagttttttcattccaagtcattcttgcatagagatatcaagcctgacaattttctcatgggtctcgggaaaagagcaaaccaggtttatgttatcgattttggacttgcaaagaagtacagagatacatcaacacaccagcacattccatacagagagaacaagaacttgactggaacagcaagatatgcaagtgtaaatacccaccttggaattgaacaaagccggagggatgacatggaatctcttggatatgtactgatgtacttcttgcgaggaagccttccatggcagggcctgaaagctgggaacaaaaaacaaaagtatgaaaagatcagcgaaaggaaaattgctacttcaactgaggctctctgccgtggatatcctaccgaatttgcttcttacttccattactgtcgctcactgcgtttcgaagatgcaccggactatcagtacctgaagagattgttcagagacctttttattcgggaaggttttcagtttgattatgtttttgactggaccattctaaagtaccaacaggcacagatgaccactgctccacctcgtgcaattgctccagcagtaggacaaagctctgggatggctcctgtggcaaacaacaatagacattcaggcactgaagagggaaggagaagcgggtggtctgacatggacccaatgcgacgccaggctccaccaccagttataaatgcaggcagcctagccaagcagaagtcgcctgttcggcctgagacatcaacatcgaaagatgctgtgttctccagttcgacttttttgggacgttcaagcggatcgtcaaggcggcctgctgtatctagtagccgagagctaagcactgaagcggagcaaacacgtagccgcacaactgacgcgagcccaggggcattccagaggtctggagctccacggtggagcccgcagatgcctgattcctcggacggcaggcgttcgtcttccagcaggcgccactcatctaaccccaagaactacgagtctaccattaggggcatgcagggcctaaactttgatggcgatgacagggtgcactattagcatctcatctgtctgggagggtgcatcgcctcccctccccatagatggatgtaccaaggacggccagataataaaaggtttgggtgagtgagcccgagcagtccgggtgacgtctcgtaggaactgtgtatgctgcttagcctctgttgttgtacaggcttgtcatttgtttggtctgcgcttaccggtagggcgcgccttgtccggtgaacgatgatggtgtattatgagagggatttcttaaggggttcacgtttggtgtgcttgggttgctttgatagaaacatttgggagaggtttatcgcgcctgctctgctctctcatgtaactccagattgctgagctggcacctgctctgctctctcatgtaatgtaactccagattcctgagctgctatgttttttttttaaaaaaaaaaaaaaaaaaaaaaaactaaaaacaaaagaaaaaacatattacaaaaaaaaaaaaaaaactcgagggagaggggncccgggtaccca

SEQ ID NO: 5438 - DNA, 3271 bp, Zea mays
cattgggtacctcgaggccggccgggatagatagggggcctcccgcgggccgggcgggaggaagccaagtcgcctgacttgcgtcttcttgcttcctcctgtgccgtgtttcatttctttgacacaacgacgtccgggcagccgcctcctgtcgccagttcgccactctctggttgctgcacgcctctagtcggcggggccaagaggtggaaaagggcaggatgaagtccggcgagcggccgaagcagatgcggggcgtccggcaggaatctcggcggttccggcttctggtcatcgtcgccggcttcttcctcgtctccctgaccttcgtcgtcatctccaagcccgattccatcctgtccagcctgaacggcaagctgccggtggaccaggcgccgacgtccatcctgatccagcagaaggttaactcgccccccgccaccgcacttgagacctccaccgacgcactgcgtggagaccctagagtggtcgatgacgaagccgatccaagaccacaggggttcaagggcgaggaggaagagagccgggtactgagcgagccggacgcgaccagcgggatgacggagctgacccccgacaaggacggcagcggccgtaaatccaacgaggaggtgctaggcggcggaggtgacggcgaggggaaaagtaaggaggaccgcggccacgggccggagaagcataaagtgacgctcccaaccgtttccaactacactattcatgacaccgaggacacccaaaatgccaagcaagacgatacaagtaatgaccagcaggggagcaagcccctgtgcgacttctcaaatttcagagcaaacgtgtgcgagatgcgtggtgacgttagagttcacccaaatgctgcatcaatcatgttcatggagcctgggcattcgcagagagatgagctgtggaaaatcaagccgtaccctcggaaaggggacgagttctgccttagccatatcacggagctgacggtgaaatcaagcaaagtggcccccgagtgcagcaagtaccatgacgtgcctgctgtgatcttttccctgacaggctacactggaaatctgttccacgacttcactgacgtgatggtccctcttttcacgacagcaagcgagttcaacggagaagtccagttccttataacggacatggcgctctggtggacaatcaagtaccataccgttcttgagaaactgtccaagtaccctgtgatcgatttcagcaaggacggcgaggtgcactgcttcaagcatgtcatcgtcggcctgcatgcctacatggagttcacgatagactcgtccaaggctccgcacaactactcgatggttgactttaacagattcatgcgcggcgcttactcgctgggcagggacagtgtcaccgtgctgggagagtaccctaaggtgaagcctaggctgctcatcatcaagaggcaccgcacaaggatgttcctcaacctggacgagatcattgcaatggctgaggagctcggctttgaggtggtcatcgacgaggccaacgtgagctctgatatctccaagttcgcggcgctggtgaacacggtggacgttatgatgggcgtccatggagctgggctcacaaactgcgtgttcttgccgcagaacgccacgctgatccagattgtgccgtggggagggttggaatgggtgtcccgcaccgacttcggcaaccccgcggagctgatggggctgcactacaagcagtacagcatcggcgtgcacgagagcagcctcacggagcagtacccgagcgaccatgagatcttcaagaaccccatttctttccacaagaaagggtttgacttcatcaggcagaccttcatggacaagcagaacgtgaagctggactgcaagaggttcaggcctattctgttggaggcactggacaacctcaacgcgtaagaccgtaaaagcttgtgcttgtgctcaattggtactgggcatggcaataaagattccttcctgtatacaattccttcttttttttttacaattcgttccttttagtaaaatctattgttcgttctgtccctccctgagaaggttcgcattgtggaaaatttaggagaaattggcttataaaagttgttgtatacacactgtataaattgctgccactgcatagctttcgttctaatcaatcatacatagctcccgttccaggaaaaaaaatagtataaattctgccggcgatccactcttgttgccaggtggcagccgcagtgccatgtgcgacatgtcttctttcatcctgcaacactacagtattttgggctggtaccagcaaagcgatgtgctgaggcgcatgcagtttattagttaactaccctggctcccacatggtcagcatgtaagtacaccaggtctatgataacaataagatttttaggaaacatgtgattatatatgctttaagcatgtgatggtacaggggacaagctagttcaactaccaaactttggcatccccctcacggcaaatcgcgacttcttttagttagacacggccggtctatgtggggagtgtggtccaaccacgaacgaagtctacaagcttgtgatatgcctctcgagagtcatattcacaaattttacacattattggtcctcgactccaaaccgtgctgtcttttttctagggctcttttgaaggattattttatgaatcctatattttttctaaattttttgaactatttttttttcaaattcatgtattatttatgtgaaattcccgtgttcaaaggaagctcttagaaaggatggccctaatatagcactgatgtgacattgattctgctgccatatgagtacgatgacgttaatatggtgcgacagctcaataatatattgagattatattggttctgccatgtggatataaaaataaaaataaaatcattggacgcaagtgctaattgtggatttgacaccaatcccagattatcttggatctagggatgtgaatgatatgagcattattcgttggtattcaaattcgattcatctaagtgatacatattttagtccaggttactcactatctgatccgtatctgatttatattcgtatcggtatactcaaagtcagatatttaagatattgatatgcatttaaattttatccagcacaactcaacgatccaaatttaaagaaaaaaaactgaaaaaattatagtcgaagcaatatcagtctatattgatacaattacaactctaagggctagtttgggag

SEQ ID NO: 5439 - DNA, 1863 bp, Zea mays
aaaagcaaaaagctacaccaggtctacagcgccgggagcccgggagtccgggatccagccacggccacggggggcgctctcgagagaaagatccagccccaaaggcccaaacccgaaacccctctcttcttcctccttccattggggtcgcgtccaacaagaggctggccagccatcccgcgcgagccacttcctctctcctccccatcggatccagcgccacgcggatccgcaaggcaatccatggcctctacccaggcggaagcggaggcgggggcaccggccccgcccgaggcggcggaggcgaaggagaagggcaagcagggcggggtgctggggagggtgtggcgggcgctcttcggtggccgcgaggacttcgagaagcggctgcagtacctgtccaaggaggaggcagccgtgcacgcgcggatgcgccggcggacgcagttctcgcgccgcgccgtgcggaacctcatcgtactctccgtcctcgccgaggtgttagctgttgtttatgccatcatgacgacaagaaatgaggatctaacttggcaaatgagggcaatacgagtgctacctatgttcattcttcctgctgtatcctctgtcatatattcaacagttgttaacttcacaaggatgtttgagcagaaagaccagaagacccttgaaaaattgagggctgagaggaaagccaagattgatgagcttaaagagagaacaaattattatctaacacagcagcttattcagaaatatgatcttgatccagccgcaaaggctgcagcagcttcagttttggcatctaagcttggggaggagactggcttaaaagttcatgttggagaagaaccaaagctggatgctgcagtggccagaagcaatgatgttgagatagtaccttcagatggtttgagaaacaggaagcaacccaatgcaagaggaagcaggactgggagccccacttctcataccccagcacagggaactgaaactaatctacctcctgctagtgctgtcctggaaactgcaccagctccagtggtggtagagcatcatcaagggtcaggggctagtgatggtggtggatggattgcaaagattgctgccttacttgtgggggaggacccatcacagtcgtatgctttgatatgtgggagctgccatatgcataacggcttgtcccgaaaggaagattacccacatgttacttactactgcccacattgtcatgcattaaacacatcaaaccagtccatggggcaatactcaggctccaactcaggccggtcgacccctgttgttctggctgatggattatctacttccagctcagtacaagagactgaattgagtaacctgacgacattgcaggagctacccgaggaaggaaagacagacaagcaacaagtggaggcaagttgatggttcttatgacttgtattgttgatgtgtgtggaactagtttatctttagacttatatcgtcatgtgttcaactggtggagccacagatttagcactgttgtaaattggaaatagtgagtgatatgatcgtcggaagcatagcacgcaaaaacaagaaatgggacatggtgtacatccttgagtggatgattttttgttgtcatatagagcgcgaagtcttcttcctgcgagacaaaaagctatatgacgttcagacaagatggtggtgcaggatataatataagatcattgcttgttcagagaaaaaaaaaaaatagaattttttgcgtttgtcttgaccttcggtcttttctttgttgtttgttacattaccaccttacagcatttcgtacacagtttccttatgatgttgaaaccgtacttttcatttggcgtt

SEQ ID NO: 5440 - DNA, 1921 bp, Zea mays
ggtaccctcgggccggccggcgcgtgggtgcccccagaaattgcgcccggccgccccccattcaccttcaaaaaaggagccaggcttcccatcaacgagggtgtcggccatctgagcagctcccctgcccctcgcagcggctactctacaggtctagcgactctttcgccatccatagagggaggaggcgcggcggagatggtgggcggtggcggcggcgggccgctgcggcgggtgggcaagtacgaggtgggacgcaccatcggggaaggcaccttcgccaaggtcaagttcgcgcagaacaccgagaccggggaaagcgtcgccatgaaggtgctcgaccgctcctccatcctcaagaacaagatggccgaacagattaagagagaaatatccataatgaagcttgtcaggcatcccaatgtcgttaggctacacgaggttttggcaagccggaagaagatatttataattctggagttcatcactggcggcgagctattcgataaaattattcgtcatgggagactcagtgaagcagatgcccgcagatactttcagcagcttattgatggtgttgatttttgtcacaagaaaggagtctaccatcgagacttaaagcctgaaaatctcctccttgattcccaaggcaatcttaaaatttcagactttggactgagtgcatggcctgctcagggatctttccttctacgtacaacctgtgggactccgaactatgttgccccagaggttctcagtcataagggatataatggcgcacttgctgatacatggtcatgtggagtaattttatatgtattgttagcaggttatcttccatttgatgaagtggacctgactaccctttatggaaagattgagagtgcagaatattcattcccagcctggttttcaggtggtgcaaaatcactgattcgtagaattcttgacccaaatccagagacacgaatcaggatagaagagatcagaagcgatgaatggtttcagaaaaattatgaacctatcaaagaaatagaaaatgaggaagtcaatctcgatgatgtcaatgcagcttttgatgatcctgaggacgataatgaggatgctttcgaagatgaaacaggtcctctaacacttaatgcattcgacctaatcattctttcgcaaggattgaatcttgcagcgctctttgaccgcagacaggactgtgacaagcttcaaaatagattcttatcacgcaatccagcaaaggttatcttgtcaagcatggaggttgttgcgcaatcaatgggatttaagacacacattcgcaattataagatgagggtggaaggtctaaatgccgacaagactagtcatctctcagttatggttgaagttttcgaagttgctccatcaatcttcatggtagaactacaaagagcagcaggagatacttcagagtataacacgttcgtaaataactactgcggcaaattagatgatatcatctggaaatttccaactgagaagggaaaatcaaggataccccggttatcaaagtctcattcataatctagtgctgtgtgttatcaattactatggacttaagtggatatatttgcagagtgtatcgcaattggattatgatattctaagtgtagctcttcgagtagtatatgtttgtatattcagagtccccatgtacaaagaggccgttttaattgaggtttccgtacctcgattccctgtgcaaagttttcatcgatgttttagactgcacatctgtatattttgtcgagagcatcagtttcttagacaccacctatgtatcatgtgtttgttgccaactagtgtcatttttgtaagatctaacttgtgatatacttggattgagtggtatggttgaaaagagtgtgaaagtccattaaaaatgttagtg

SEQ ID NO: 5441 - DNA, 1723 bp, Zea mays
aaaccaaaccccgtaacccccccccgtcgccccaaaaacgcgacgaatcgcgcagcgcggcagggggaatcgctgcgatttcttgtggcccggcggctccagccccacggctgccgagcggataacgaacgactggcggcggctcgcgtcggccttcctcctctccttctcctctctcctcgcatcgcagtcgcagcaggcaacaaaccaaatcgcttaccgcccccgaagcgtctcggttcgcatagcagagctgctcttgcaacaagccaaacaacccagtggctgctagccgagacaggggatagattgagagagaggcgcgcagatggcgacgccgtcgtcgtcgctttgctccagcttcgcctccctgcggaccgcctccatcggccacccccgtggcatcgcctcctccacgcccaggaaggcattccatgtgagggcatcagctcgggttgacaagttctcaaagagtgacatcatcgtgtccccttcgattctgtctgcaaactttgcgaagcttggtgatcaggtaaaagctgtggaggtggcaggatgcgactggattcatgtcgatgtcatggatgggcgctttgtgccaaacatcacaattggacccttggttgttgatgctctgcgtccagtgactgatcttccgttggatgtacatctgatgattgtggaacctgagcagcgagtccccgattttatcaaggcaggtgctgatattgttagtgtccactgtgaacagacatcgaccatccatttgcaccgaacagtcaatcagattaaaagtctaggagcaaaggcaggagttgttttgaatccagcgactccactcactgcaattgattacgttcttgatgttgttgacctggtgctgattatgtctgtgaatcctgggtttggtggccagagctttatcgagagtcaagtaaagaaaattgcagaactgagaaggttatgtgcagagaagggagtgaacccctggattgaggttgatggtggtgttggtccgaaaaatgcctacaaggttattgaagctggcgcaaatgccattgtcgcaggttctgcagtttttggggctccagactacgctgaagctatcaaaggaataaagaccagccaaagacctctagctgtagccgcataaggagctggacgtgtaatcatttactctgtgcaagtttaccagtgatgcgatctgtatagatgtgtgtcttgtccagccatacgtataccggagatgaaaggagacggaggcagtgaagaaatatccttttttttcttctcatttttcacgaggatgccgtgcactgctcccagaatgctgtgtccaatttacaaacgcacaggtggcacatgaactagcagagtagctttctcttgaaaggaaactgtatttggggtcgatgaaccctctggtgttattcttcagactggtaaacgatgtaacatgtttgataatcaataaagtgcgtcgtatggctttcctaaaaaaaaaaaaaaaaaaaaaacgagagcgcgctgtttgtacatcggcatctgactgagtctgaagcccttgtacatgattggaatttaccttaaaactgtctggaactttgcacattttttttttgaaaaatggcaggagctctgcctttcattaaagcgggaaagagggtataaaaaaacagacactcatcaggagtacacctcctgtggaacgagatcctctgca

SEQ ID NO: 5442 - DNA, 3567 bp, Zea mays
cggacgcgtggcgagacgcgtggggccacacccaacaaaaggtaatccgccgcgtcgccgcccgccgccgcccgcagatccatcccctcccggcctccctagcctttcccctcgagcacgtcagcgccctcgccctgctctgtcggccggccaagctcctcaccggcgccatgaacccgtatgatctccgcttcgctgacccctcatcctaccacgacaggcgcagcgacttgaccgtggctcctacgttcgctccgccggctcccgtggctgcggcgaacctgaacccttacgccgccgcctacccgctgcctgtgcccgttcccgtgcccgcggcccccgcgggcggcgactaccagcgctacgggcagggaggcagaggccgtggtggcggtggcagaggcggtggaggagggtacggaggtggcggcagaggaggaggtcgcgggagggacgggcttgactcgctcgccctccctaagccggactttcggagcctgataccgttcgagaaaaacttctacgtggagtgtccctccgtccaggcaatgtcggaggcggatgtggcgcagtaccgccgcctccgggatatcaccatcgagggccgggatgtgcccaagccggttagatacttccaggaagccaacttcccagattactgcatgcaagctattgccaaatctggatttgtggagccaacacctattcaatctcaaggttggcctatggctttgaagggtagggacctgattggtatcgctcaaacaggctcagggaaaacattatcttatctgttacctgggttggttcatgttggtgcccagcctcggctagaacaaggcgatggcccaattgtattaattctcgctcccacgagagaactggctgttcaaatacaggaagaatctacaaaatttggatcatattcaagaactagaagcacatgtgtctatggtggtgcacctaagggtccacaaatacgggaccttagaagaggagttgaaattgtcattgcaactcctggccggttgattgatatgctggaagctggtcacacaaacctacgtagagtgacataccttgtgttggatgaggcggaccggatgctagatatggggtttgagccccaaattcggaaaatagtagcacagatccgcccagacaggcaaaccttgtactggagtgccacatggcctagagaagttgaagccttagcaagacagtttctacaaaatccttacaaggtaatcataggctcacctgaacttaaagctaatcattccatacaacaaattgttgaagttatttcagatcatgagaagtatccaagactcagtaagctcttgtctgatctaatggatgggagccgtatcttgatattcttccaaacaaaaaaggattgcgataagatcacccggcagcttagaatggatgggtggccagcattatctatacatggtgataaagctcaagctgaacgggactatgttcttgcagagtttaagagcggcaagagccccataatggctgccacagatgtggcagcacgtggtcttggtatgatgatttatttgaatattaggattaggtagtagttccaagtgctcaagggtgataagtcggagggttgttgagctgcgattggttgagtgaactgaacttgtggattggtggtgtataccaaggtgccatcatgtcaaaggtagataatttccccccgtggtttacctcatttgagcgtgagcattggcagtgttacacaggcagttcaactttgagctatcatggtaatgttccctttccgaataagccttttagggagcctacatttggataaaatggaaatcctcaaaaagtagcatgcaaccgaatatgcatttcacactatagttgatttcttagcttgatttgaattccttgatccctgcatatctgaccattttggaacatttaggtattgtgttgctgccctcttcattcattctttgtccttgtaattgaattcttttcaatccaatagtctgcttttcttgcaagtatttttggcttacctttctacattttctttgtaaatccatgtttaatttgtttagaattaattggagcaataattcttttcagagatgtattgcaaaattttaggcataaaacatttgtatacaaatgacaatatcaatttcaaatatatttgtttgcacaaatgcacattcttcatgagtagcatgtccatggatctcctttgctttcccctagttttacatgaacctttagaaagtcgttctgctttctcaatcaagctcctcatcatcggtatcactgccaagtgcgaactggtcaaaaggatggttgtaatcagcattcttttcagttgattcacgatagtgacctctgatgcagcaccttacacattacagcctacgttggactggcatgtcctacagaattttgtttgggttatggatattgatgctgttacattattggataagtggttacccaggcatgccagttgcagtcttccaacattttttgataaggctgagaggttaatcaccatcaattccacatccagcagtgattgatgcctggttcagtttttcagctccttcgacttgtgttttagaattcaaaagtgcagcactgtggactttttggtgcttgtctagaccatgtaccttctatggggatcgacaatgttgatgttccagcgtggtccagcatggtattcaggacaacacatcaattttgattaagtactgataatatttgttgattttgcagatgtgaaggacataaagtgtgtgataaattatgattttccaacaactcttgaagattatattcacaggataggtcgaactggccgtgctggtgctagcggaactgcatttacttttttcacacacgcaaatgcaaagttctcaaggaatctagtgaagattctgcgagaagctggccaagttgtgaatcctgccttagaatccatgtccaggtcttcgaactcaacgggaggaggcaattttcggtcgagaggcagaggtgggtttggtaaccggggccatatgtctggatcaaatacctttcctttaggaggaagaaggccatattgatgtgtgcaaaagaactgtgggagtatgggactatttgtatactactcggcattaagtgcattctttgggaaatttctgagaaatttcccctactaccaggattgataacaccatcgattttcgctacagtacctggagcttcttatatgaaagaacaacacatcaactatctagcaacagcatatgcattccattcagatatttcttttggaaggaccctgtcttgttttagtggagtccctgtgatcgtttaaagtcgtctgtatacttgtactgaacttcttgtggtgttactgttaggatttatggttgctctctattggtgtgcggtgttactgaacaaatttagttaagaagttaggcatttccatatttaatctgattctgaaataaactagcaaatttatgatgtacactttataatagtaaaaaatatatatatgcaaactctatatgc

SEQ ID NO: 5443 - DNA, 1710 bp, Zea mays
ccccgcccgctccccgccctcgtcacctacaggcccaagtgggaaggaggcgaatacgaaggcgatgacgaatcacggtttgaggctctgctattggcaatggagctgggagctgaatatgtggatgtcgagcttaaggtggctgacaaatttatgaaacttatttctgggaggcctcctgccggcgggtaacttatagtttcatcccacaactatgagaccactccatcgtccgaggaacttgcaaatttggtggctcagattcaagcaacgggggctgatatcgtgaaaatagctacaaccgctactgaaattgttgatgtggcaaaaatgtttcaaatacttgttcactgccaggaaaagcaggtgccaatcattgggctggtgatgaacgacagaggttttatttctcgggttctttgcccaaaatatggtggattccttacttttgggtcactcaagaaaggaaaagagtctgcacctgcacagccaactgctgcagacttgataaatctgtacaatattaggcagatagggccagacactaaggtctttggtataattggtaaaccagttggccatagcaaaagcccaattttgcataatgaagctttcagatcagtgggtttcaacgctgtgtatgtgccatttttggtggatgacttggctaaatttcttgatacatactcttcaccagactttgctggcttcagttgcacaattccacacaaagaagctgctgttaggtgctgtgacgaggtcgatcccattgccagggacattggagctgttaacacaattgttagaagacctgatggaaagcttgttggctataatactgactatgttggtgctatatctgctattgaggatggaataaaagcatcagaatcagaaccaacagatccagacaaatcaccactggctggaaggctttttgttgttataggggctggtggtgcgggaaaagcactagcatatggggcaaaagagaaaggagcaagagttgtaattgcaaaccgtacctttgcacgagcacaagaacttgccaacttaattggtgggcctgcattgactcttgcggatttggaaaactaccatccagaggaagggatgattcttgcaaatacaacagccattggaatgcatccaaatgtgaatgaaactcctctatctaagcaagcactcagatcttatgctgttgtgtttgatgcggtctacacaccaaaagagaccagacttctccgagaagctgcagaatgtggagccacagttgttagtggtctggagatgtttatacgccaagctatgggccagtttgagcatttcacgggcatgccagctccagatagcttgatgcgtgatattgttctgacaaagacatagtgagtggatgattacaaattccgagcaattgcaagttcattggacaatcctaacaccatgaagcctcgtctgtgagagattcatccatgcccacaaacttccttgtttttcctttttagattcggattcagtgatcagtttgcctctcagccattgtaaattaatttgatgttccgagctgaaacattttggtgtgccttatttgtatcagcatgaacagcagtcatcgtgggtttgaatcagtctcttagcatttgcgttccctaaaaaaaaaaaaaaaaaaaaaaaaaaaaagaaaaaaagatacaaaaaaaaaaaaagtac

SEQ ID NO: 5444 - DNA, 2752 bp, Zea mays
gacggatggcttcatccgattggtgtggtctatttgtctcccagtcccactccgtccactcgagctctccaccagctttccccttctctccggtccgggaatcggaagctcagggcagaaggtaagctaccagaccatgtcgtagcccctagtttctactgcttgattattacttttcgcttttcttgggagtacaattttatttactcgccgttttggggctgttcatgtttctgttagtgtgtttggtgccttgattttttcagataattggtgcctttcttgataagttgatatacaaccgtggatccttggaacttcgatttagttagtgactccgtaggtatcagataaccaaaaaaagaggaatcacgtgaactaccggttatatttcccctggatttcgacaaagctttttaggaaatttcgtactttttttcatggagaaatttcgaagacaccaatgaagttctcgcataaaataataaaaaaaccctaagcatgctcgattttcatttttttttttgccatgaacaactgctagtcaagcacaaaacaaggatttcctaattctccacactcgacaaccattattttcacagcttcaagaactctcaacttcccctcaccccaacccaaaagaagtgaatacaaccataaccttcacagcttcaagaacttttcaacttcaaggaaatttctaaacagtaattcttttttaagctggtgaggtgtcccggccctcctgtttcctgaaaaaaaagcacgactgaactagatgttattaggtccgcacatgaattgcatacgaaatgttttcctgactggggctaaatcgctagttaagccatggggcagacgcatcttttgttgctcgcttgtttctgggtcctgtcaacatgctccttgctacttgatgcttcctccgatggactgttaagaatcaacctgaacaagaagagactggacaaggaagctttgactgctgcgaaattggcgaagaaggagagccaccttcgaaggtctgtgggtgctgaccagtatctcagtgcctcaactgatgacatagtccctttggacaactacctggacacccagtactttggacagatcagcatcggcacgccaccacagaacttcacagtgatattcgacactggaagctccaacttgtgggttccctcatccaagtgctacttttcgatagcgtgctacttacaccacagatacaagtcaaccaagtcgaagacttacacaaagaatggagaatcttgtacgataacatatggttctgggcaaatcgctggcttcttcagtgaggacaatgtgttggttggcaaccttgttgtgcaaaatcagaaatttattgagacaactcgagaaaccagccctactttcatcattgggaagtttgatggaattcttggtctcggatttcctgaaatttctgtaggaggagcccctccaatttggcagagcatgaaacagcagaaactggtcgcaaaggatgtcttctctttctggcttaatcgtgaccctgatgcatctgctggaggcgagcttgtctttggtggtgttgacccaaaacactacaaaggggaccatacatatgttcccgttacacgcaaaggctactggcagtttgacatgggagatcttattattggtggccactcaactggtttctgtgctggtggctgtgctgctattgtggactcagggacttcattgcttgctggtccaactaccatagtggctcaagtcaatcatgcaattggggctgagggaatcatcagtacagaatgcaaagaagtggtgagcgagtatggagagatgatccttgagttgctcatatcgcagacaagcccacagaaagtgtgcactcagattggtctctgtgtatttgatggtgcccattctgtcagcaatccaattgaatctgttgttgagaaacagaagcgtggttctgatcttttctgtactgcttgtgagatggctgttgtctggatacagaatcagctccgtgaaaacaagacaaaagaactcattttgaattatgctaatcagctctgtgagcgtctccctagccccaatggcgagtcaactgttgattgccatcagatctcaaagatgccaaatcttgcattcaccatagcaaacaagactttcaccttaacaccagagcagtacatagtgaagctggagcaagcaggacaaactatctgcatcagtgggtttatggcatttgacgtaccgcctcctcgtggtcctctctggatacttggtgatgtttttatgggtgcctaccacactgtttttgacttcggcgagaacaggattggatttgccaaatctgcatgaggactggagttctgcgctttagtagcatgtccagtttgttatcccggtattgtacatatatatgttgccaactggtgtaatccgcagtgtttaatagtatatattcatgcagaaatctagaagattgtggcatgatatgtgtttgcaaatggagctatgctatgtatggagctccaggacctagagttttatgtaaagggagacgatgaggattagggcttttaacctattctcatcacgttattgtcctgattactaaaaaaaagtataggttgctgagcttgtttgggagcaagacaattggaggggatgagtggactaaaattcccttcctatcaaaattgaatatgaagagtattttagctctctcaatcttcttcaattctcttgc

SEQ ID NO: 5445 - DNA, 1549 bp, Zea mays
  misc_feature (20)..(20): n is a, c, g, or t
  misc_feature (34)..(34): n is a, c, g, or t
ggctaaaagaattatatatntgggacagaggggntacgttggaagcatctttatagccagcagtcggctgtacttgctcagtcaagaaaacgcgacataggcctccctcaccaacactatctgctataaataaaaggatcccgccagtacattccctctacgtggtcattgaaccaaatcgcagttcctatgtcgacacatcactgtcaatttccacggaagttccagctgcaatccgatgcatagattacacagaatgcatatacttccaatagtaggctatgccatctccatatcactgtgactcatgagtacagtgtaaacatgaaggcaacgttctgttcgtaaggatttcagaacattttccgagtaactcatttatatgatccgttattcgatcttcagatatggtcctgttattcgatcttcagacttactaaagcaaagccatgtggagaagaacttcgccctctacttggccttcttggaagcctcgtacaagtagccagcgataactacggctgcagcaactgctaccccaaaggcactctgtgcaagcacggcggcggttggaagatctgatttggatggtgctgtgctgcgaggcgtgaagccaagctcagagagtttcttgtgtgattcagcataatctttgaagaacgcatcttcatcctttgcatagagctccacatagcgcctaaattcaggatctgataacagtgccttgtcagttgggagctttaaaagtccctcagattcctcattcaacagctcaagaaagtatgagttatcaaacttaagaggctcctttgtccaggcaccatcgaatccagacctctcagggtgagcccttcccagagtatgtccccctgatagagctacaatatctttgtccgataagcccatccgataaaagatgtccctcagatgtggtgcacctttcttagcatctggcagacgcccttcacgggggcacaccgacgaatcacgtctgccaggaataaattcaacagttggccccccagtcacttcgactgcaaccactccagcaagctgatacaggtctgcatatgttatctttggattctttgctttgataggctcaaggagatcgatagcaatctttaaaccagcatttgaaccatgagtgtactcttcttcatatctaatcgaaccatttgcaccaccagtttttgtcttcaggtcataagttccagcatcatgccatgcgaggcggagcatgatcggggcgcatcccttgttggagatgagggcgcggaggtggcggcgcgccctgtcgacctggcgcaggtattcggcgtcgaccatgggagccgccatcgccggcgcctcagccgcggattcctggagatcggagagttggagtggaaccgtgggcggagcggaggcgtgtgggtggcgagtgctgactgactgctgagcagtgggggatgggaagggaggaaacgacaactgacgagccgaacaagataacgcaagcgagcgattctattggcctccagttgccggcgcctggcaacccccggcc

SEQ ID NO: 5446 - DNA, 3608 bp, Zea mays
ctgtcactctgcaactggttgcgtcacacaattcttcgataacagtttcaatcatcctatcatttactttagagcataaccaacagtgatattagacctttaggatttgaaatctttggaagcaagagtaccagagaggattgagggagctagaacccctcactattcaataacaggcccttaaattggtatcacttggatttcttaagacagcatcacgcctaccctgatgtatacatgataacaaattaatttagtctaggaactagagtacaaggttacagaggctatctggcaatgccctctcctacagacaacgcatattttgcttcaggtcaaaacccgccgctagcatttgtcggctaacatatggtactattgctgctaaagtgctaattacagatacagtgagttggagaacatgataccccgacgcaaactctcacttgcattcttgaacttcttctcaaggttaacctcccctacggcttcagcagcagctctcaactgattcagaaattcatccagccttctagcaagtcttatgacacttccttcaaatatgtcggtcatttccatcacctccgcaaaggtggctccccttgaccaacagtatatgacatccataaggtagggtctgcaggttgattcaacatattcctccacatttacttccagtttgcattctcgttgtacctcagctatttttcttgcagcctcctgaagctgcatcatcggcctagaaagttcatttcttaggcgtatctgctcacttgatttatcacaaggtacaaagcagctagcaagggaagcaacttgatgatggtcaagatcattaaatgtaccattgaacataagttcagtgataagcagttcatcccctgtgtctattagacaggcagcacgtcctttcaactggagaacaccgtcagcatcaatatgccccagcatcttcagaacacgggaccggttcctaagttcatctctaaatttttgtagctgtgaatcccgcatctttgacttgagttgctgaatttcagtattcagatctgcttttttttggtaccatgatagttcctgttcactttgaccggacttatgaagtcggtgagagcattgtttctgctcaaggtcttcaagtttatgtaccaagtcaactagttcaggttcttgaatacccatgtcattgattggatgtagtttcggaagaccttgggggtagcgctttcctagttcttgcactgcagaaagtatattctgtcttgcttcaggtggtcgtagatcaggaggaatgttgattctaacactgcttagaccagatactaaaggcaatggtacaggcaccacatgcatttcacccttttcccctgggcgaggagggcatggctttgaacgtgatccattctcgctggaattagaggagcagtgaagcaaggtgtcgactgtatagttgttgctgcgcgatgcacttaatgcaggagggagagtcccagatgctggaggtttcttcactacatttacaaccacaccccatccccagtctgttgaaccatccctcactctaaccagccttccaggaaccaaatacaacaaagccctctctggtctaatcatctcagacatgattttcttctccagttcagatatatcaagccccaatttgtgatattcagcaagatcagtctcgccagaagaatcaagcaaggtagcttcattctccaaccgtgtaatcttttgagctatttctggcaatgccttctcatactgaaattcatggaatgaatgcctaatcacatgctcagcggtaaattggccctccacacggctcattaagttcagaatagtgtagtagctcagacggaaagtactgactagaggtgctggtttgcctaacaccatgtccttgataacactcatttccatcttctcatctatcattataacacagataccacgttcatccttgccacgccggccagctcttccactcatctgtatatattctccagaaccaatatagcggttactatcgccatcccattttttgacagacgtgaaaacaaccgttttcgcaggcatattaagacccatggcaaatgtctcggtagcaaagagagctttcacaagaccttcttgaaagagcaattccactagctccttaattattggaagtagtccagaatggtgtactgcaatacctcgtttaaggagtggcaacatcaactctatagcaggtaaacttctgtcttcctccactaaacaaccaatggcattacagaaaacctgctcaatgcattccttttcttcttcagtgctgaagtcaagttttgacatagacatggcatgatgctcacattctcttctactaaagctgaaaattatgactggttgaaacttgcgctccataatcatcttaacaattctgtatatgtcagaattcccagaggcgcttccaccttttgcaattcggccactcgctttaggtccaccacctttccttccatccagttgattatttggcttagcaaaggagtcttgtagcttcgcaaagttatcttctctaaactggccattttcatctactacaaggtaaagaccagaaccacctattggaaacatatagtgctgcaatggtgtgggcctgaagtccgtatacacaacatgacagggctgcttgtgcaggctgcatatccattcagcaaattcggtcgcattcgacatggtagccgaaaggaaaaccatcttgatggcagggggcaagaaaatgatgctctcctcccacacgacccctctctcacgatccttcatgtaatgtatctcatcgaatataacccaggcaacctccttgatcacctcggagcccctgtagagcatcgccctgaggatctctgtcgtcatgaccaggcatgtggcgttcggatggagcgtgacatcgccagtcatcagcccgacatctgtgaactcctgactgagctccctgtacttctggttgctcagggccttgagcggggaggtgtagatgaccctctgcttgtccctgaacgccatggcaatggcgtactccgcaacgacggtcttccccgcggaagtgtgcgcggagacaagcacggactcgttccgctccaggcaagcgatggatacgctctggaaggggtcaagcttgaacgggtactgcttggccatctccccattgaaggccgggctggcaagcgtcccgtgcaccgcctcgtccttaaccgactcgtacccattcgggacggctacctcgtggacgcaagagcgggagatgttcgggcgcttggccgccgggtccgcctgcgactgcgccggcgccggcgcgaggctcggctgctcttccacgctcgagtccggcgccttgcgcttgcagttgctctccgcctcttcccccatcggcccctgctcgacctaaacctggctgtgctcgtcgccggcgaagagcccgaagaagacctgggcagcttgcgttgggcgacagcggctgtcggctgtcgcccagtcgtctccacgagagaggcgagagggagacagcgcgcgcgacgtgggggcggggttggcggcggccggcgtgcaactgtgaatgcaacggg

SEQ ID NO: 5447 - DNA, 1893 bp, Zea mays
gggaccctcgaggccggcccggccgaacacggatggaattggcgcgggcggcgggctggcagttgcgcagcaataactcccgctgcccaccggctcacctgtccttcatccgccccgatccgaccccaaatcaattccaaattcaatccggtctcagtggttggcccgccgctgccagtgccagatcgaatcggactctcggctcgtgtgcagcccaccggcgagacgccgaagctatatttttatgcccatctgatccgatgcgtggtgtggcgtcgtctccgcttttactagatcatcagtagccagctcaggagccgagcctggtcagggtagccaagcccatcccggtcctctcccggcgtcttctccctccgcaccgcggctccggcgatggcgggcgtcggctccgcgctgcgtcggctctacctctccgtctacaactgggtcgtcttcttcggatgggcgcaggtgctgtactacgcggtcctgacgctgcgtttgagcgggcacaaggccgtctacgccgccgtcgagaggccgctgcagttcgcgcagacagccgccatcatggagatcgttcatgggctcgtagggttggtgaggtctccggtctctgcaactcttccacagattggatccaggttgttccttacgtggggtgtcttgtggagttttcctgagacccagtcacaccttcttgttactaccctggtcataagctggtctatcactgagatcatcagatactctttctttggaacgaaggaggcatttggctttgcgccttcctggttattatggcttaggtacagcacctttatgttgttgtatcctactggtatctctagtgaagttggtctgatctacattgccttgccttacatgaaggcatcggagaaatactgtattaggatgcccaacaaatggaacttctcatacgattacttctattcatctgtccttgccctcctgatctatgttccaggaagcccacacatgtaccgttacatgctctcccagaggaagaaggcgctatcaaaggccaaagcggcatgatgatgccaagcaagggaatcggtggactggtttgcgtgatggatgccggaacatgttcaagttttcgacatcccctgtagaatctagtggtcgggggatatatattactagaatggggctcttcatatgaactgccccgtatgcgtaatgtgttgtaccggagtcatcatttcagatatcagctgttgcgtggttaaatcgtagtttgcttccggatcacccatcagttggggggtggattaccatgttgattatataaggcaatgcgttccgcatccttccctcaactggtgctgtgctctcttgtttctagcgtacgatgaatgatggattttatcccgggcctggaacattttgcatgctctagcttcatgttgattattatatagcaaaattagcaatgtatttcttacttatgacactgatttttttttaaaaaaaaaactgccaagggggatccccacctgaaaaaaaaaaaaaaaaaaaaaaaaaaaaaaaaaaaaaaaaaaaaaaaaaaaaaaaaaaaattgggaggatttattatctttctcctttttccccctcccctggaccctttaagcctaaccaggatcagctttgttgctgcggaggcaatccctgtcgcctgctccctttgatccccatgagagtaccacgccacacccttaaggtccagctggcctcccctcccattttttaagaacaatctgcaccatgctgctgctgctgctccatgagcagacggaattcttctatctggttcgcccgatgagaagaaagataaaaaaaagtcctccgaattctgctttctcacccttgctgttcatcgattcc

SEQ ID NO: 5448 - DNA, 2342 bp, Zea mays
atagcgggccttcgcgctcgacctgggcgccggcgaagccaatcgccaagccaagccaagccagaagcggcagcctcgcgcagcggtctggtctctctggtgggtggtgcccctcttcgccggtggccggaaaggggagtggagtgggaccgctcaaggagaggccggcgtccccaagtctcacttccgccgtccgctttccccctgtagggatcgagggaggaaggaaaggaggtgcttcacaatgaaggccctcattcttgtcgggggtttcggaacccgccttcggcctttgactctgagcttcccgaaacccctcgtggattttgcaaacaagcccatgattctgcaccagatcgaagctttgaaagaagttggggtcacagaggtggttttggctatcaactaccgcccagaggtaatgattaatttcttgaaggactttgaggataagcttggcatcacaattacatgctcccaagagactgagcccttaggaaccgctggccctcttgctctagcaagggacaagcttgcggatggatctggccagccattctttgtcctcaacagtgatgtcataagcgaatacccatttgctgaactcatcaaatttcacaagtgtcatggtggtgaggcaacaattatggtcactaaggtggatgaaccatcaaaatacggtgttgtggttatggaggaggcaactggcagggtggaaaggtttgttgagaagccaaaaatatttgtgggtaacaagatcaatgctgggatttacttactgaacccatctgtccttgaccgcattgagctgaggccaacatcaattgagaaagaggtcttccctcaaattgcagctgatcaacagctctatgcaatggtccttccaggtttttggatggatgttggtcagcctagggactacattactggcttgcgtctttatctagactcgattaggaagaaatcagctgccaagctagctactggagcacatgttgttggcaatgtgctggtgcatgagagcgccaagattggagaaggttgtctgattggtcctgatgtcgccattggacctgggtgtgttgtggaggacggcgtgaggctttcccgctgcactgtcatgcgcggcgtgcgtatcaagaagcatgcttgcatctcaaacagcattatcggctggcactcaactgttggtcaatgggcacggatagagaatatgactatcctgggggaggatgttcatgtgtgtgatgaggtgtacagcaatggcggtgttgttctcccacataaagagatcaagtcaagcattctgaagcctgagatcgtcatgtgagctctccagttttagctacagtacattcttaacttctttgacgaagggaggattgcagatccccttttataaacgatattgcttggtatcttcgatctaatgcaaacagcttcatacttggtctcttgttaaactattgacaatgtatcttgttttttgttgaaaagtttagtacttgagtgtcaatcatacgtattcgcttgctaaactattgacaatgtatcttgttctttgttgaaaagtttagtacttgagtgtcaatcatatttcagagtcattgtgatatactgagctcgctgcgttgggccctcgacctgcagaagttcaatacaattggaagaataagttaaaaaaaacgtggtccaaagtaaccttcagcagtaatgtttgtgtgctaaatgctcttccggagaattgtggtgatgcaaaccttgtaccaatgaatatacactgtcaatctgctatcttttccgtggcccctaactcttagagtgtgtttggtttgagttgaggaatcacttcatccaatataaggtggtgtattgtgaatctatttctcaaatttgatgggttgatcttattcttatgttagtactaactaactaggaataagacgtagatcaactcattccattctataaactaaacaaaaaaattaaaattgagaagatagagtagcttatttcttaaaccaaacaccctattagttactagtactttctttaattttaaaaataattttggcaggagcaggctagtggtgagcaactgactaactgagtatagagctaggtgctccggcacttgagtcccgactcctacctgtagaattgtgttttcagtttgaataaaacgttggaatcatttttttaaataaatgctggaaccatggcatttatgcaagggatgctgtacgatgtcgactgtttctatcatcagagaagacttgtctttaaatcattctaatataggctagaaagagtgatggatgtattgggtatgagccagtgaa

SEQ ID NO: 5449 - DNA, 1618 bp, Zea mays
cttaagagcctaagaccattgatattgcatttcaatgctagatcgttgaacttgtatttttatttaccactagaacttcgatgtgaatccgtatgtgttggtcggcccgcctcaacctttcctctccgaagctttgagaacaacagcaggctcaacggtccagagctacaaggattggttccttatgattttggatgttagatgccgatcaacaatgtaccaccttccccagttgaaagggggaaagccaagatagtattatcaatagaaacctagcttcaagaatgtcgtgactatatatatgtatgatattaagacgagatttgataagggtggcatagcaagtcctgatattctgtgtgcattcagaatagctgcttttatgcccttgtgttgatattttgcaaaccaaaacaaactgttctgaaacgagggcacatattgttcatgaataaatttgagcctccaatacatacatttcatgttttctgtacaacaaaatcgcacgataaaagaataggacacttagcaagtcataagcatctcaaggaacatcctactccatctgctatacaaaaacgatcacgatgttcataccagctgaagctggctgggcattgggatcaacacatgattatatagagaaaaaaacattgaaaaaaaaaaaacatctgcagactgttcccttgaaaaaacaaaaatggctccagggaaacgctggcttccaagtaatcgctaaatccccgcaaaattgatcgtcgaccaatcagccccatcgcttggggattgggcctcctcatatattgaccaaaagttgcccctctgtaatatgaactgcaatgattatcctccaaattactttgcagatggttctgtcaatggccttccatataggcggaaaagtaatgaggattttgacatctgaggctctcgctcgagtgccgctaccacatccttcatagaaatactccgcgccacttttgttagcggtgaccttctaacaccaccagatccaagcgcaaaagatttatgactaagaaaacaaactagtgcatgcatggtagatattactctgtattacctaacctagaaattcagtatctaaaataaatttattcatatcgtacattctgtcttgtttatattttgacaagttgtttcattgactaaaggcatgtttgaaagcacccagtttttaaaaaactggtttatgaaagctgagatggttccaaacgtactagaaactggattctcaatttcttaaaaataaaaaaaaactacacttgcctagctaaacccagtttatgaaaactgaggtggttccaaacaccgtaacctagtttttttcgtaaaccagtttctaaaaactggagataaaactggatatttaaaaactaagttgcttctaaacaaggcctgagatagtttggtggtaccctgataaacacaggaatgttattgtcatcttaggttctattgaatttgaaatgaggtcattttaaagaatatttctagtttttactgaattagcgttggtagagtggcacatcactaacattttaaaaatagatacgtgtacacaacatttaaacaaaaatcaagggatgacctaaatagc

SEQ ID NO: 5450 - DNA, 951 bp, Zea mays
cccacgcgtccgcccacgcgtccgcccacgcgtccgcccacgcgtccgcttgcgacctcgtgccaggttcagctggccagatcggtggcatgcagcagccactgcaaccacaagttaaccacatgggagttccacaaagccagccaatgtatagtaaccaaccaatgcgacccggtcaggttgccgccacaacacagatgcagcctggcttcggaaaccagcagttcggttcgctaccaccaacatccatgctgggcatgcaattcggtggcatgcagcctccgcagatgtatggcggatcgcagccagtcatgatgtacccgcaacaaatggcagtggcccagtatggagcaatgccgcggcagcagccgacgtatggtggtcgattggcgggttacatgcagcatcctgctgtggctgccgcacactactacaacaaccaggggatgtatggctaccccggtgcgaacgggctgtcacagagcatgtatggcctctcggtgcaggacaactcgtccatggggatgaggtcgtcttaccagactacgacggcgccaccctccacggggcaacctatgaagccaacgaagcccgaagacaagcttttcggtgacctcctgagcattgccaagacgaagaaagcttcatgagacgagctcgagcaggagcggccttctgatatatcgtctcccctatttttcgtggtttttcgtgctgtttgatcttacacttgtaacattatctgaatgtgtaagctttttgggggtccttttcttttattcccacgtcgtgtgtgatctattgatcccattggattcgttataccgtgtgcgtgtactgatcacgagcgatgggaaactttggccgtaaatgatgattcaataaagggtgtgcagtacgtgattatgaaaaaaaaaaaaaaaaaaccccacgcgcaagcccgccctcccc

SEQ ID NO: 5451 - DNA, 1791 bp, Zea mays
cctgccgggagacagatgtcaaccccgaattttccgtcgccccccctgctcgccgtcgctccttcggcccttcctctctcccatctcggctagggttaggtcgtctcgccaagtcgccatgatgcagcagcccccgccgcagcagccgcagccgggcatggcgccgcctccgcctccgcaggctgctggcgggcagccaccgcagtggggtgggatcccgccgccgatggcgcagcagtacggcgcaccgcctccgcagcagcctccggcgatgtggggccagcctccgccgcaggcgcactacgggcaggcaccaacccctcagcagtactacgccgcgccgccggtgccggtgcaggcgccagccgcccccgctgcggcggacgaggtcaggacgctctggatcggggacctgcaatactggatggacgagaactacgtcttcgggtgcttttcgaacactggggaggttcaaaatgtgaagctcatccgtgacaagaattcagggcagcttcagggttatggttttgttgagtttacaagccgtgcagctgcagaacgagttcttcagacatacaatggacaaatgatgccaaatgttgacttgacatttcggctgaattgggccagtgctggtgaaaagcgcgatgatactcctgaatatactatttttgttggggatttggctgcagatgttacagattacttgttacaagagacattcagggttcattatccctctgtcaagggtgcaaaagttgtgactgataaattgacaatgcgcacaaagggttatggatttgtgaaatttggtgatcctacagagcaagctcgtgcaatgactgaaatgaatggaatgccttgttcttccaggcctatgcgtattggtcctgcagcaagtaggaaaaatacaggaggtgttgttcaagagagagtaccaaattctcaaggagctcagtctgagaatgatcctaacaataccactatatttgttggtgggcttgaccccaatgtcactgaagataccctaaaacaagttttttctccttacggtgaagtcgtccatgttaagatccctgttgggaagagatgtggttttgttcagttcgttaccagaccttctgctgaacaagcgctgctaatgctgcaaggggccttgattggtgcacagaatgttcgactttcatggggtagaagcctgtcgaacaagcaggctcagcctcagcaggaatccaatcaatggggtgcggctgctggtgctggtggctactatgggggctatggacaaggttatgaggcttatggcagtgggtatgcacaaccccaggatcctaacatgtatggttatggcgcttatggcggttatcccaattaccaacagcaaccagctgcacagcagcaacagcaacaacagtgatgcctgtttgctcgggtaggtcattgggttgtcgcgacggaattaattaaatattatttcaggacactctcatattgcattcttgtcaattgaggtggttttgaaaggctcctgattttgatggccccatggcacggtttcatctatttattagtatatgacatatatgcgctgtgaacaagtggcgctctactgtgattgctgtgttgagacatgctttcttagtttctttccatgtttctcggatctgttgtgttacctttattactgtgtatttgcatatctactgtgatgctatatatgcactgtgccgtttgtttcctataaaaaaaaaaaaaaaagagcccccgcccgggaatccggaccgtacggca

SEQ ID NO: 5452 - DNA, 2424 bp, Zea mays
gcacgagaccattacctagaacatcctaatcaaaaaattcgagttcgaggcgacaggcatcgtcgtcccacccagcagtgcagagactctctctccctccctctccccggccacctctcgctcacgagcaccccatcttcccggccagggcctgggtatgggtgctccgctcgcctcctggccatgggcaagcctcggatcatacaagtacctgctgtacgggcctctggtggcgaaggtggcgcacgcgtggagggagacggggagcctgccgctggggtcgtggtgcctccacctcctgctcctcctggcgctccgctcgctcaccttccagctctggttctcctacggcaacatgctcttcttcacccgccgccgccgcgtcgtcaaggacggcgtcgacttccgccagatcgacgccgagtgggactgggataacatggtgatcctgcaaaccctggtcgcggcggtggcgatgggcagcgcggcgttcccggccgtgtcggagctgcgggcgtgggacccgcgcgggtgggccctggccttgctcctgcacgtggccgtctcggagcccgccttctactgggcccacagggcgctgcaccggggcccgctcttcagccagtaccacgccaggcaccactcgtcccccgtcacgcagccgttcacggccgggttcggcacgccgctggaggcgctgctcctgacgctggcgatgggggccccgctggcgggggccttcctggcgggcgctgggtccgtgagcctggtctacggccacgtcctcctcttcgactgcctccggtgcatggggtacagcaacgtggaggtcatctcgcacagggccttcgccgccttcccgccgctcagatacctcgtctacaccgccacgtatttgagcctgcaccacagggagaaggactgcaacttctgcctgttcatgcctctgtacgacgccctcggagggaccatcagctccagatcgtgggggctgcagagagaggtcgaccaaggcatgaacgaccgggtgccggacttcgtgttcctggcgcacgtggtggacgtggtgtcgtcgatgcacgtgccgttcgccttccgctcctgcagctcgctgccgtgggccatgcgcccggtgctgctcccgctctggcccgtcgccttcgccttcatgctcctccagtggttcttctccaagaccttcaccgtcagcttctacttcctccgcggccggctccaccagacgtggagcgtcccgagatatggcttccagtacttcatcccgtcggcgaagaagggcatcaaccgccagatcgagctcgccatcctcagggcagacaagatgggcgtcaaggtcatcagccttgctgcgctgaacaagaacgaggctctcaacggcggcggcacacttttcgtgaacaagcacccgaacctgagggtgagggtggtgcacggcaacaccctgacggctgccgtgatcctcaacgagatccccagcagcgtgagggaggtgttcctcaccggcgccacgtccaagctcggcagggccatcgcgctgtacctctgcaggaagaggatcagggtcctgatgctgacgctttcgacggagaggtttctgaagattcagagggaggcgccgccagagttccagcagtacatcgtgcaggtcaccaagtaccaggcggcgcagggctgtaagacatggatcgtgggcaagtggctgtcgccgcgggagcagcggtgggcgccgccgggcacgcacttccaccagttcgtagtgccgcccatcatcggcttccgccgggactgcacctacggcaagctcgccgccatgaggctccccaaggacgtcgagggtctcggctcctgcgagtacacgatggagcgcggggtggtgcacgcgtgccacgccggcggcgtggtgcactgcctggaagggtgggagcaccacgaggtgggcgccctcgaggtggaccggatcgacgtcgtgtgggaggcggcgctcaagcacgggctcacgccggcgtgagcgggagggcgcccggagcgggagaccgagacggccggcgcgcgcggccccgcccggaaataacgcgtcgtctattcgttgtcgcatggctgttgcgacgggtgggtcggtgtgctaccgtgtactactactaccagctactagctaccatagtccaagactgctgcaagcgcaatgcaacagagttgataggctggttcgcatataccaatactcttatgtacgtaccgaatactgcaatattgcacgaggcatgggcttccgttacttatggccaggcctgcgacctagtataaaaaaaaaaaaaaatctgtactgttcattgggctctaaactggattgaaagtctgggccggaccaactgggcccacccaagcatggtacaaaagcaatagccc

SEQ ID NO: 5453 - DNA, 2457 bp, Zea mays
ttgggtacctcgaggcccgccggcgccttcaccgccacacgctgccacgcgccatatataaccagccgttccctcctctcatgctcccctttccaaatccgtctccgccctcacgcacgcggcccaactagcctaacaaaccctagctagatttagaaaaaaaatttgtccccaatccgaaccgacgaggagctcgccgccgtgagatgtccgagtacgacgagcgctaccagggcaacggcgacatgcccgcagccgaaggcggctatccgcaggccgagtacgccgccgccgccgcgcctgccgccgggggttcgccgcccgcagacagcaagccctccgggttctccgaccacgccgacggccgctcctcccagcaccagcacgagacacaatcacatgacagtggttcctcgaaatctcgagaaagggaccgagaacgcgataagggcaaggatagggagcgtgacagggatcgtggccgagaaaaggggagggaccgagacagggataaggatcgtgaaagaagtgacagagatcgcgatcgccaccacagggaccatcgagagcgcagcgagaaaagggaacaccgtgatcgttctgatgatcgtgaccgtcaccgtgatggtcgtgaccgccaccgtgatgatcgtgattctgagaggagaagagatcgtgacagagatggtcatcgtaggcatcgctcccgctccccttctaagagtcgtgaccgtgaccgcagatctagatctcgttcacgctctcgatcaaagagcaagcgcgtgagtggttttgaccaagcacctccacaacatgcacttcctattgttgctgctggtgctatccctggtcagcttcctggtatcactgctcctattcccggggttggggtgcttccgaacttgtataatttggctgcaggacagttcaacccccttgttattcagccacaagccatgacacaacaggctacccggcatgctcggcgtgtctatgtgggtggacttcctccaacagctaatgagcagaccgttgccatattcttcaatggagttatggctgctattggaggaaacacagctggtccaggtgatgctgttcttaatgtctatataaaccatgacaagaaatttgcttttgtggagatgagatctgtggaggaagcaagcaatgcaatggctttagatggcataatgtttgagggagcaccagtgaaggttagaagaccaacggactataatccttccctagcagctgctcttggcccgagccagccaaatccaaatctcaatcttgctgctgttggcttaacacctggctctgctggaggattagaaggtccagaccggatctttgtaggtggtctaccatattatttcactgaggctcaagtgcgggagttgctcgagtccttcggacctctgcgtggattcgatcttgtgaaggatagagaaactggtaactcgaagggatatgccttctgtgtttaccaggatcttaatgtcaccgacattgcctgtgctgcccttaatggcatcaagatgggggacaagactcttactgttaggagggcaaaccaaggagcttctcagcctaggccagagcaagaaagcatcctgctgcaggcacagcagcaggtgcaaatgcagaaactcgtataccaagtcggaggtgccctgccgacaaaagttgtctgcctgacacaggtagtgacagcagatgaactgagagacgatgaggaatacaatgacattgtggaggacatgagggaagaaggacgcaaatatgtcccacataatgccattgcagagtgttttatagtccgaccctatgcaatattggcaatcgggctttaacccacagaagacactattcttttgagtttgattaatcattatatcattagcctcttgcctatatatctctactcactaacacttggacaggtaacttggtgaaagttgtaattccacgacctgaccccagcgatgctccagttgctggtgttggaaaggtgtttttggaatatgcagatgtcgagggctcgaccaaagcaaagacggggatgcatgggcggaaatttggcgggaaccaggtggtggccgtgttctatcccgaggacaagttcgctgctgagcagtatgactgaaagttgtagaacctgttctagagttgcaacacacaatgtgtgtgttttttttaaaatctttgagggtaccggtttctcttgaatttgaatcttatctagttataagtttggtgcaggaccagtcgataagcgataagtttgtgcaggaccattaggctttgtttgggtaattagtattgatcccaatccaaatctatatatgttaatgccttgttcagttattcttattccatatggattggagtgtatcggaatgagttttgacttgctatagatttaaacaaactcaaaaaaaaaaaaaaaaaaaa

SEQ ID NO: 5454 - DNA, 1505 bp, Zea mays
  misc_feature (1361)..(1361): n is a, c, g, or t
  misc_feature (1383)..(1383): n is a, c, g, or t
  misc_feature (1442)..(1442): n is a, c, g, or t
  misc_feature (1455)..(1455): n is a, c, g, or t
  misc_feature (1467)..(1467): n is a, c, g, or t
  misc_feature (1480)..(1480): n is a, c, g, or t
  misc_feature (1502)..(1502): n is a, c, g, or t
gggcaccgcgaggtaccgcccgggactctccgcaatatggcgcggggttttctagggtttaggggtcaggccgcccggtgttgtgtcgtcaggtagccgcctccccacctcttctgcttgttctccgcggcggcggcttggatcggagcggaggaagaagatggtggcatcgatcagggtgcccaagacccaacgcgccaggcgggagcttctcaagcacgcgcccaagcttgttgagaccagcaagaagacactgatcctccatggtaccaagactagtgctgtgttgaactctgtgctgtcagatatttaccacctaaagcgtgataatgctgtgaaatataccaagaagaatgacaacattaggccttttgaaagtggtggagaatcttctctggaatttttctcccttaaggcagactgtagccttatagtgtatggttctcattcaaagaagaggcccaacaatctgattttgggtagaacgtatgaccaccacatatatgaccttgttgaagtaggagttgagaactacaagtcaatggaatcttatgtttatgataagaagctagcaccattacttggatcgaagcctttctttgctttcataggggaacactttgagagtgctgaagagctgaaacatttgaaagaagtgctgcttgatcttttcagaggagaggtcgtagagaatctgaaccttgctggtgtggatcggatctatgtgtgcactgcaatctctcccactaccgtctacatgatgcactgtgctctccgtctaaaaaggtcaggtacatctattcctaggatggaactggtcgaagttggaccttcgatggatctggttgtaaggaggcacagacttccagctgaaagtttaaagaaagaagctatgaagaccgctgaacatgctaagaagatgaaaaacgtcactaaggatccagtgcagggcaagctgggcaaggtctacatgccagaccagcaggttggaaagttgaccttatcaaacgacataaagggactaaagagggagcgccgtgaagccaagaaaaaccaggactcaaagaagcaaaaggtcaaccccgagtaaagatcactgaagtttacctttgcattggatacaggtcaggttaagaaaccctggtttgtatctgttcccatctgctgtgttatccaattagaagttgctcgttgtcagatagtgttaaatagtttagggccatcttgttaggctaaagacatgtgtacgactttcacaacaatattgcgtaccaattcatgttaagactgtaaccaggaacaaatttgagagtgttatcctatcaaacagccaacgtcttcctgaagtcccccaacccccngtttaaaaggaaagaattgttnggttaggcctttgggtgaaaccccaccgtttttaaaacctaaccccattcccccaaatnggaaaaatttccnaaacaaaccccnaaaaatgcccctnaaaagggtttttaacccccttnaat

SEQ ID NO: 5455 - DNA, 2796 bp, Zea mays
atgcataattttggaccgtgtcatgtttaggcggtgtttttgttttgtacttcagagcagcccaaaagaacccatccaaatgtacacctcaagacgagcctcccgtgttggtccagttgcaaacaaactctggcttctattgtggtggcccgtaaacgaagtgcggttggcttgcaacagtgaaaaggaaggctgcaaagcccatggaagggcccaagcccaacaatacatgcagagaccagagagttctctgtatgtgaagacgtcaggtgggcgtaataaagaacatttaaattcgtgggccagtcatgttatcgagaacatctcccatttttctcgctgtgtcgccacgcagagatattgttgggtggagatcttccgttgattttctagctccagcgttgtgttgataagattggagtagcgtgagctctcggccttgcgacgacctgagctctgtctccagccaaccaataccactagatgttagaaacttgggcgagcctcctgctcagtcaccgtggtttcgcctcgatgcatgcatccaattccaatcgccgcaatttgtgtgttttttttgttctgttagtttagtatcgcatgagtacgcttggaaaaatggccgaagcctacctcctccacttgctaaactttggcaaatcatcattagcgctaacccttcggtcttatcacaagagcacccacacttgcttagaagaaatccccacttgggccacttgccaatacagcccttcccacaaactggggggcgggaggaggttttcggtttagcgcaccccgacagtccgacgctggcaaccatctctgcggcatcggctgtggccgcctcgtgagtcacggcgcgctccaagggttccggcgcgtggcggccacgcgctctggcggtctgtccgttcggcggcaacagcgatggccgcagagtagaccgctgtcccggatccccgaaaagctcagaaaccgcggcgtaccagccacgtccgcggcgcgtccccagcccggacgcccgggtctacacggccgtcgctgtctgcctgtctgtcctccgccctcaacagagcgacagcggctggccgcagacgcaactgaatggaaggtggggcggggcacatgcattgcaccacctcttgcggagttccaaccgccgaatagcgacaaggtggcccgtgcccgcggcgacatggtagccttatcccctcacacgctgacatgacacgttcacgatcacgcagctctagcctcccccgcccgccccgcgaattttggagcccccacgccatcagtccaccaccaccacacaggcacacacacacacacactttcctcgcccaaccccagcgctttctcctcctggcttcccctatttaagagccgccccgtcgtcccgagaccgcgattcccaagcaaacagccaaacacacgcgaagaaaaggagatagagtacaggttacagacaggcagagagcaaagatgtgtggtggtgcgatcctcgccgagctcatcccgaccacgccggcgcgccgcggcggcgcggcgtggcccgccggcaagtgcaagcggcggaaggcgaacgacttcgaggccgcgttccgggagttcgacgaggactccgaggaggaggaggaggacgacgagggggtggtggagagcaagcccgccttcgtcgtccgcgcctcgtccgcggcgacgcagcccagggcgcgccaggagcagcggagccggcgccgggcgcccgaccagcagcagtacaggggcgtccggcgccgcccgtggggcaagtgggccgccgagatccgcgaccccgtcaagggcgtccgcgtctggctcggcaccttcccctccgccgaggccgccgcgcgcgcctacgaccacgccgcgcgccacatccgcgggcccagggccaagctcaacttcccctcctcctcctccgcctccgctgccggggcccccgccagccgcaagcgcgcccgcaccgccgacgccgacgccgtcatcgacctcgaggaacaagagcagcgcccggccgcggcggccctgaagcacgaggccgccgagtgctccggatccgacgcgctcccggacttctcgtggcagggcgtgtcggcggcgtacgacgaggcctccgcgccgcgcccggccttcgacttcgaggcgcggccggagagcgccgcggacgaggcgtcgccccgggcctccgactccgagtcggacgcgctgttcgactcgctcctcttcggcgaccagttcgccttcttcgacgccggcgcgtacgagtcgctggacagcctgttcagcgccgacgccgtgcagagcaacgccgccgccgcggcggaccaggacatgccgctgtggagcttcgacgacggctgcctcgtcgaggacaacctctcgttttaagcttcggcgactgttgctgtgtcttgagttttgtaaattacgacctgttttttttttggagtttctgctcatgtatatctgtatcgatggtgagctgaatgaaatcatccttctcaggaagtaaaacaaaggaacatccctcccttctaaaagtcatgaacacactaatttcataattgatcgacagcctaacccgactagaagatgcatcttctagaccatgttgaagacggaccctcgcctgctcgacggaggcacatgcgtgtccatgtttgggttgacgatataccactttttaaaaatctggaataattcagtgttgacaaatccggtttggcatacatgctactaaaaaatgagcaaaacaaatcaggattttgc

SEQ ID NO: 5456 - DNA, 2286 bp, Zea mays
acgcattctcccggccctggactattcttggtgggtggagagagccgcagaaggcagctggaagaggagaggaccgcgcgaggctccgtgccggcgagttcgggtgcttttcctgcggtccgagatgcgatcgttgggacccgggagacagcgcagctcgggttcgggttcgggggggcggtagccacctgagcaggatgtttaactggaacgacgagcagcaccaggtaagggatgcaatatgggctgaattcaatgagtgtgatgaccatattgtgccttgtcctaaaggtgcacaagatagcacgatagttagttccagggttcgcaagaacaatgaggaagaggtggctagtattgctgccatcactgaacagtctgcaggtgttcaaaatggacatcaagggatggaaaagcagactgcaagtcacacaagtgcacatatttcagccacacaaattgacatggaatcctggcctgatcttccttccctgaatcctacacttgatagaaattatagtgatgacaacatagcatccacatatctggatttttgtgctgcaaccagtttacaagaagtgaccggaaattctacagagcaactagatggtaaatcagaagtgtttggtaatgatcaagaagaaaagagtaacagtttccttgattgcgactggggcaatattggagattttgatgattttgaccgtctatttagccatagtgactccatatttggtaatgagatagttgccaacgacagtgattttctttctgcatcttcgaatttgatggatactgctgtgctatcaatcccaattccggtcgaagcacataagaggccagtgtggtcacgtagaaaaccagaggaaagaggtaaaagtaaaatatccagcagtacaagtggcttctcccacagcaaagtagagagttcatcgacgaatttgcaaactcctatggaacctgtacagactcctcaatatgcactgttccaggatagcaagaagataggagaagttcagcatgctaatcagtttatgtttcctggatatgggtatcctgcatatccatttcctaccattccgttagtgtcaaacattcaagctgaaggctatcagacaaaaccagctggcacaagctaccgaacttcggaagattacctaaaacagtcaagttccacagaaatgtcacaagatataccatcaagaccactaacaatgacaccacaagaaaagatagaaaagcttaggcgccggcaacaaatgcaagcactgatagctattcagcaacaacagcaacagtttggtcaacagggtcctggcagtgacacaatggtgtctcaagcatacacccctggtaacaaaaatccggattccttagggagttcaattgtcatagatgaaaacacaaataaggttatttcgcctgagatgattccaactgaccatgaccgggttcacaagagttctgcaatttcagatgatccctttatagaggaaaaaatatattatcagctacaagatgctcttggcaagttggataccaaaactcgactatgcattcgagatagtttgcttcgtttggtccatagtgcaacagagagaaagattgatggtgataggagcactaacaagactaataaagatgaagatgaagcttcggaagacgcatctactaggaaaacaaggtctccaaacaaggaagcagaaacaaccactaatccaattgatcgtatagtggcccatttgctgttccacagacattgctccaaggttgcaaaagcaacaaaagaaataatatcgtcaatccccttgactctagaacctgagccgaaggtacccttgggaactcctagggttccatcaaaagatcaacgagatgagcaagaaattgtgttgcaaccatcacaataatgtgagatgtgctagaagataaggttttactcaatttgagtaaacttatttgcatttagttagcctatgaatctaatgtcgtccttctaatgagtatagtacacatgctgattaatcaactgttcaggataaaaaattatgcaaatccagtgatgatggcagtcttatgatcacctgtggccccggagatcgcttgtgtaatatgtagccatttcaacattgtaggatccttttattttcatcctgtaagaacatctcagattgtataggaacctacgattttgtgccgagccgtaaaaagagcaaaccttggctctggacataaggcgtgtttaggagcaagaggattaaagcaaaccttggctcttggctctgg

SEQ ID NO: 5457 - DNA, 1585 bp, Zea mays
cgggtatttgtgttttttttgtcgttaaataataccaagataccaattaatcaatatctttctctatactaatcaattcaaaggcaaaagcaaagggagtaacttgccacagaattatagtatttcaattcaatgaatccaggaagttgcattcagatctccgtgactactaatttgacagaggagttgcacagcacaggttacatatctaatcttaggagctggaggcaaccgctggcagcctgaaactacagtccggttcatgctctccgggtcagaaaccagcaaacacaggtctatctccgacactgcctgcgccaacatcacccagcatacaaatccctttctgatatcttgtgaagcacattcgtcgacatgtagggcgacacacatccgcggacctgcaaaagagcagtaggtatctcaatgagaccctgttgcaaaagatcaacgctttgcaggcgctggagaggaacaggagttattagatataacaggcctttttgaatatcgacgccccttatgatgccaagcccaacacagtaagggattgatctggttccctcagatgcattggaaactgccaaaccaactatggttgcattcagactatgccatatctcaccagcaggtaccttacaatgaagatgcacaattgcaacatctgaaaatggtacttgataaggtggaagtgaagctagggcataagcaagctccttattagttgaaagagagatgttgcttggaaaacattgtttcaaatactctacaagtcggcgttcacgcattccacatgaatctttctgaattaacaacgatctatttgaggcatcatgaaatgcagcatcgatgttaatcatcataggtcctgtttgcccaccatctaaccaaaaccctccatcagggagatttttgttcttgattgtgatgcgtatctgaacaactattgtggggcagatataccttagcatctctacgagcatatcaaagccagcaccttttacccatccaggtgtattgacaattagtggcagcatttcattctcatcgcatcgatattttccaacaaagtagtcatacgaatggaatagacaattcagatatgcttctggatctcttttcgatgaaatgtcaccaaagaagtagcacctttcagcttcccgtaggcttgggttcatcaaatctgcgatagcttcgtcgaggacatggaacgagaggcatcccggcggcccgaactccggctgccccacgtcggtgtccagataagcaaccttaccatgcctggggagcagcgcgttgaggaggacacgggagaaggtggacttgccgctgttcttgggcccgcacacgacgaccaccgggggcgtggggtgggaggagacggtcgatacagcggagtcccagtccggcgggactaccgcctcggtgcggggcgccggggaagacgaccgcggaggtgttcgcgtcggcgtcgcgcggccgcgggcgccggccatgtcaggaagacctcgtcgtggttcgcagagggcagagggcagagcaagagcggcgcgagcccaagttcatcactcctgcttcctccggc

SEQ ID NO: 5458 - DNA, 1407 bp, Zea mays
gaactcgtaaatcttgtgttcctgtgtggctgctttcgttagatctctcggctatgtctatatgatcgtcttggccagcatctctgggttcttttcgcggccgagaggaaacttactaactgatcgagtgtgccaggcatcaatctgtcgaatcgtgactcgtcgctttttcatgtcttcagattttgtccatctgtcaaatcatgtggaaaaattggcatatcttcttgtattctcttctgtcctttttaatgcctccagcggattaattgcgagctccacgcccttcagcagcttcagcctggccggccggcctgctattaaaccactttgcttgcaagtccaagaaactgctagagaggaacaagctgagatctccagcatggggaggggaaggattgagatcaagaggatcgagaacaacacgagccggcaggtcaccttctgcaagcgccgcaatgggctcctcaagaaggcgtacgagctctccgtcctctgcgacgccgaggtggcgctcgtcgtcttctccagccgcggacgcctctacgagtacgccaacaacagtgtgaaggctacgatcgagaggtacaagaaggcacacgccgttggctcttcctctggccccccactcttagagcacaatgcccagcaattctaccagcaagaatccgcaaaactgcgcaaccagatccaaatgctgcaaaacactaacaggcacttggttggtgactctgtgggaaacttgtcactcaaagagctgaagcagctggagagccgccttgagaaaggcatctctaagatcagggccaggaagagtgagctgctggctgccgagatcaattacatggccaaaagggagactgagcttcagaatgaccacatgaacctcaggaccaagattgaggagggagagcaacagctgcagcaggtgactgtggcccagtctgtcgcagcagcagctgccaccgacgtggagctgaatccgttcttggagatggataccaaatgcttcttccctggcggccccttcgcgacactggacatgaagtgcttcttccccggcagcttgcagatgctggaggcacagcagcgccagatgcttgccaccgagctgaacctcggctaccaactggcgccgcctgacactgacgttgccaacaataaccctcagcagttctaaactggatccatgagaaagccaactgtgaccgatggaagctggctgttgcctctagatgatattggcttccataacctagcttattatggtgtgtattgttgccttttgtgtgtgattctccttactactgatggagaataaacctaatcgattgggcataatgatcaaatgctacagcacccgtgaggctgtgatcaggacatcatgtttaaaaaaaaaaagcggcc

SEQ ID NO: 5459 - DNA, 1986 bp, Zea mays
gcactgaatcacaaagctttgcaaaatcgtgtacatatcttacttggacggcaacttaattgactggtagccctggagaataatatgaaattctgcctgtctgccaactacaaatacctggtatgtcaacagaaactaagataaagaatacacggtgtcacttgccactcttcaagctcctggtgctgagactaattctaatacataataccagccagcagtttactgcagaaatagcaaaatgtgataaaaggaagctggggcacaactccctcctttcataggagtcggcttgataggttcctatgcagtaagtccaggttcgtcaggtgtaatttgagcgcggatcggctctcgatcaagacccttcgtcggcgacttgttttctagctcttctgcagatggaacagatggtgcaatgtcaactttggttgtttgctctgaaggcagtttaggtagagatttccgttggggcttcttcactgcatttgcagcaggtgctttcttgacaccattttgggagaccctttcatcgagactcagtcgacctgaacgagctggaggatttggattcccttctgtccctcctgaggatgtgttcttggagcgaccaagctttggtgacctagctcttgttgtaggtatcttcttcaactcaaccttggggggaggtggttccttataaaagctgggcattggtgttgccttgaaatttaaactctttctcagcattttgagttcagcttcttcagtttcctttgattttgcctgcaagttgcttttctctagttcctgtgcatgaatcttctcctcgagctttgagtagaactctcttcgtttttcagctctctcatcacacttaaaactaaatccatatgaaggagtgctgccaaccctttgaggtttcacactttcatttgattcttcttcaatatcctttttgacagaatgttggtttgatgccttctgagtttttttcttctcatttgagtcctcaagtgatggggtctccttggcaactgggcggaaactgctcttttcggcctttttcttactggaaccagcatcaccattgctcaaagagcaatcaactagatctggatcagaaaccccggccattgggcgccttaggataagaaggactaaaagagcttttcctagtttgactcttatccccgcctcgagggctctgtcgctgagatttagtaccaaccttcattgaatggccttgaaccccctcaggaactcgaggctttatgtcctgggactgcgaggtggcttccatttctacttcttcagatgggttgatcacctcgctctcgcccgaatgggctccatcagccagcacatcgtgttcttctgcgtgcccctctacactatcactgggcggcaacttccccgcggccccattgtcaaagcccaccgcaccaatagcatcagtaacctctgtactagcatccatgtgacgctaccgtctcaggatatctttaggccagattaaaaagacaacacccaagccaccagcttgcacaagctatccgcaatcaccgcaggatcatgctatgccgaccagcaaatgaatcagcgtcaaactagactgcgagagaaggaatcagctcccggcggatccgatctccgctccaccccagcggtgcccagtggggacaaggacggcgaagaatccgaccggaggcgtaaggcaggcgaggtctcggtcaaggaaacctggatctggccaggcgaaaacgatggggagtgaagaggctgaagcgcgcgggggaggcaaggattggagttgggcgcggtgaaggcgggagagcagcgacggtggcgcgccgccggcggcggcggcggcggaagggaggcagcgggggccgtgcgtggctcgtgctttgtctgggtttccagggtggtggtgtggtttcgattctctacggggcctttctcatttctgcgcccggcccggccggcctcgaggtacccaat

SEQ ID NO: 5460 - DNA, 2191 bp, Zea mays
gccggccgggctcgggatttgctccatttccatttaaacacacaagcacacgcagggcccccccggattcagatttcatcctcggcgtcgtctcctgtcctctccacgccaagcaacctccccaccccgccccaccctccatgctcgcctcgagatcttagcgggcagctccggagagcgccgacgagccccctgatccctcctcgccgccgccgccaaccgaccgggggaggagaggaggggaggggagcgatggagaccgccgactactccgggaagctcttcgtcggcggcatctcatgggagacggacgaggaccgcctccgcgagtacttcggccgcttcggtgaggtcactgaggccgtcatcatgcgggaccgcagcacgggccgcgctcgagggttcggtttcgtggtcttcgctgacgccacggtcgccgagcgcgtcaccatcgaaaaacacatgatcgacggccgaatggtggaggccaagaaggctgttcccagggatgaccacagtattgtgagcaagagcaacacaagcagcatagggtcacctgggccgggccgtaccagaaagatctttgttggaggtctgccctcaaatgttacagaggctgacttcagggggtattttgagcagttcggtgtcataactgatgtggttgtgatgtatgatcacaacacacagagaccgaggggctttggattcatcacctatgattcagaagatgctgtggacaaagccctgcacaagagctttcatgagctaaatggtaaaatggttgaggtcaagaaggctgttccaaaggagcagtctcctggacctgttgcacgctcacctgcaggagtggggcagaactatgctatgaacagggttcatagcttcttgaatgacttcaaccaaggttacaatccgaaccctataggaggttatggcatgagggtggatggaaggtttggccagctttcaggtgcacgaaatgggctctcttcttttggcccaggttatgggatgggtatgaacgttgaaggtaggatgagtggaacttttggtgcaaactctggtttcatcagtaactccaatgggaggcaaatgggttcatacttcaatggaagttcgaatagattgagtagttctattgggtatcttggttatgactcaggatcgatgttgagttccatgtctaggaattttaatgcaggtgtaaactacccgatcaatcctacaaacatgagtgcttttgctgcccttggaaatgggggtggcgtcaattatatgggtctcccttctattgcccctgagttggcccagttgggcaacatttcaagccttgggtcagggaactttagccgtggagctggagttaataacttaagcttaccttctggctcctatgggaggagcaattcaactggtacaattggtgagcctttttctgcatcaggcaatgcatatgaagtgaacaacccagatacatatgggaacaagctctatttatggtggcacatcctggaggttcccttcatctgaagttgacgtgccttctttcagtcatgatcttggaaatgttgatccgaatatgaaatcagacatatcagcaaattacatgggaaattattctgttagcaacaatcagccaagcagaggtatcacttcatagtgggagtattactacacattcatatatgacttgggatagatgaagcacccattcagtcaggcagccaggtgcgtgcatggcaactgtgaatgggtgatatgtcaggttagttttgtctagctgaccagcggtgtggtttacaacaccaacatgctagaggaggaggaagcggatacagaaacattttctgaggggcttcttttctttgagtcatgtttttagttttgattcctgcgcgtggctagctccttttggtttttgaatgagatgtgtagtggtgattattgcggcgcatattttagagatcgtggttcttccaacataagctggaaaaagaagtctgtatacggatgaacatgtataccaaccaaagggatgctgtattatcttgcccatttgttactacattagcctgtgttttatatcgttctgaaccgttcggttttgcactctggaggttttgttggtttgttcgtgagattatctcggccgggggcccggttcttctaaaaaaaaaaaaaaaaaaaa

SEQ ID NO: 5461 - DNA, 4419 bp, Zea mays
gccccccccgggcccgccgggcacacgcgagaaaccagaagcgctcgcgagaagtaagggagagagaggggggacgacgacagccttgggacccgcggactgcatcgctcgccggtagctgacgtcactcggccccgtggaattttcaagctttggtggtggctcgtctgtctgatccgcgctctgctgctttttcttcgcccgccgcactgtatcacaactataacagtacctacgtgttcacaggtctaggcatttgtcctaccagtacagtacattggactagtaataactagtatgtatccagcaaaccgccacatggatccatactactcgcactatagaaaccatgttccttacccatactatcctcctgccagatgggaaatcccatccggtcatccacaggcaatggactcatcttattattatcggccaccaaactgtggaacttggccatatcatgatatctcacatccttctgagttccattgttgctgcaaccgggcatatcttcctgattactacagtttcagacccccattccctcaagagcttccaccccctcatttatactatcacgtgccatctccacatcatccaaatgcatgtccttcttactttgtcccatcacatccttacccttttgatcagacaccatatggttatgaaaagttcaagagccactgctgtggatgtccaactcatgtgtgccctggggctgagaagaacaatgtgaaaatcgaggaacaaaggcctgatgtcaagcttgagagcggtgagcacaagaatgctgatagtgacagtataattcaacacccaaacaagaagtatccattcatatggctgccatcaggcaatatgaaaggcaaggagaatggagagcattatgaattgtcacctcaggttttaaatgaatgggctcctgtgagtgggaagtggttaggggatgtgaagcaacaagggcaggataatgagaaggggaaacaattccagtggccaatagtttggatgccagcaggatatgatgcaccaaaccaaaaggctaaagatatgaatgacacagaagagaccccaaaatccccaaagatttctgaagtgtctcctcaatcacccaagatcattcctctgtcttggtttgggaatggtcatcatcatgatcagaaatcggctgccagaaatggttctggagaccacaacaacggatcagcagtgaagaaccaacctgtggttactgaccatcaagacagcatgatactggaaggaaaccctaaaatcactccagctgtgcccaagagcatacacgttgggaagaaacctccaagggaaaactgcaagaccattccagttgtgccagagaaagagattaatgaaaagaaggccagtacttacagaaccattccggtcataaaagaaagtgatgagaagaagattggcatgagggaaaagagggagtcaaaggaggccaacagtgctgaaatggttgaagagaacaggaaaacaaaacacaatgactcatcagtagttaagcattcaaaattgcccccagtatgcttacgtgtggatcccttgccaagaaagaaacctggaaatggttcttctaggtctcctagtccaccaaggaaggatactgacaacacgaagaaggacgtggatgaggcccagagccagatcctggagcctaaacagtctagtacaagtaaggatatcactgtgtctgaagtgaaagaaaaatcgccttatgaaatgaagaaggaagttgggtttagaaatgaaacagtggaagctgcttctgttgaacatctgcaggaggaagaagctcccacaagtaaagatggccaaaaggtccaagctgctagcactacagttggtgatcaagaaaatgcagccctgaatagcatagaggaagatcatgtgcaagaaaatgctggtgcaggaagcttgaatggatgtgacaaaagaaaaaatgaagatgggacagtgattgaaagtgaaactgcgaaagatgatgccagaacatatggagttaatttgtcagaatcagatgctgcagttcgtattcagtctgcctacagagggtatgatgttcgaaaatggcaacctttggataaactctggaagatcaagcatgtgcatgaacagatgcaagttgtgaggaagcagattcaatgccttttagattcttgcagtaagccaacacaaaaagagcaagtggccataggtgaaactattatgaatttactcctgaagcttgacgcaatccagggcttgcatccaagtgtaagggaagctaggaagtctgttgctcgagaactgatttgcttgcaggagaagcttgatactttatgcaaagcagcatctggagacttgaatcacacagatagtaatgatgatgaatctgaggggaccaagaacattatccaaactgaagctcctactgtaataactgaagcttctgatagaaagagaactattgaactgggtaaggtacaagaaccatgttcagtggactccatggagccatgcaacacagttccatctggagtttcctgggaggtgaggccagatgtagacgctagcgaggagaagaatgaaaaacaagagtcatgtagcaccacagtggacgaagcgcacgaacaagtagcatcatcgatggatatgataagtgatgaagcttttacagctgacaaccaggagcatggaattggagaatcaaatgttacttcagtggaacaagtgactgaagaagagaaaccagcatctgaggatgaagtaaaagagccaccattggtgaactccacggcactattgtatgatactacttcatcaggggattccagtggactgaaacaatacacagcttcgaccgatcagaatctctatgctgaatcaaatacagggtcgtctcctgcatccactgaggacattgacataagtactctggctgtggaaagtgaagtggcggctgagaatgatggcccaattaacagtcaggtgcatgaaactgtagctctagaaaatgtggaaatgaaagatgatgtttcttctgctgaaaatgagcataacagatcgagcagccctgttattcatttagaggacccactagtgtctttgaaggatgttgagcagcatggtccaactcctactaaggactttgttgtacctaacacagaagaccaacaagaagccagagatatcagcttgcaggtacaagctgtggattccatgaaagattgtggcgaagtaccagatggaacaatagaggcttcgacgaatgatgatgaattagaactgggtacttctgcagatgtagaaaagaatgatcaacctaccttgctggaaccaagatcggagtctgtctctgtcccagaactgtccgtcttggatgaatctgacgataaaatgcaatgtggtgtttctggcaaggatgaggaagcacatgtggaggagaaaactgtaactattgctgttgacaaggtaacaggaggttctgcaaatttcgaggatcctctttgtgaggcatcgaggaaggaacctgacattgagaagagtcacccaagcctcggagaagaggaagacgatacaataggtggaacagtcttccctggttcaggtagctgtgaattatcatgtccacaggatggtggcatcgcagtctacgaggggcctgagatggtgtcaccagagagccaaactgatgctcggaaagaaaacatccattcagatgtcgctgagacagatgaatgcaccaagactcagaaggccgctctagcaggcacagagggagaaaattctgctgaagattctggtgtgccggtgtctgagatggacaaatgcaacgagatgccgaaggatgctccgacacttacagcagcaggtgcaaatcctgctgaagacgaagcttccctgaaagacctctctgtgcagacagagaacaaggcttcttctgcctccccagctcctgatgatccgaaggccagcgacgagaagacgctggcagaagagaaccagaagctgaaagagcttctgcaaaagcttctggcgtccggcaacgatcagatgggggtcatcacggacctaagtgagaaggtcaaggtgctggagcggaggctggcacgcaagaagagaccaaaggtgagggtgcacaagccatccaggcatgcttcctgtgtccactgaaaggataagtctgtaaggttttgaggttttatgttgtatggatccccatgttgcttcctgtgtccagctattgtgcactgtgtaggtatagccatgctgtggcactgtgcttcgtcttggacaacacaaggtgtggcatgttctgtattttatgtctgtataatgcatccaactacatctagtgttctgtgagcaattgattgggacaaatcgatatgacaaaaaaaaaaaaaatgtgct

SEQ ID NO: 5462 - DNA, 1906 bp, Zea mays
gggtaccgcgaccccggcgcccaacttctcgtcgtgccgttcccatctttcctttcctcttcccttccccgtcgatctcgtcggcgacgccactacctctcgccgtccggtgccaccatccgcctccgactcctgcgacccagccacggttcccgaggatacgggccgagtccggcgatgggggtggtggtagagcgggaggagtgggcactcagccccttcgcctacccgctcctctccgccgccgccctcgccgcggtgctcctcctcccttacctttccccgaggactgcgccgcacgccaccggaccctcgtctcccttcgacgtgggcgccgcacccttcctccggttccgccgcgccttcctcgtcctcttctccctcgcgtccgtggttgaaggtatccattccgtgtttggggaggatgagttcgtgcggtgtgggcttggcagagagcagacgaccgcgcgccttgcctctaccactgcagctgcgctgttccccggtgccatttctggcgtcatctccgacaaaataggaccacgaagggcttgcatattgtactgggtacttcagcttgcagtaggtgttgtgaagagtttcagtgcgcttcactgttcatggatcaacaatttcattctggcttttgcctcttcagtgttctctttctgttttgagacgtggcttgtgctggagcatgagaagcaagaccagaagcaagatctgctgtttgataccttctggctgatgacattctttgaatcggtgtcccttgtcggaagtcaagaaatcacaaatgtattggttagtgatgatgacagtagattcttgcttccctatgcatttgcagccacactatcggtagtgggcattctgtatatcagaaatgcatcaagtacatgtcagcatgcatctgccattgggagctaccaaaaatcatttcttgctcatgtcctcagagacaaaagagtactgatcctggtcttagctcaagcaagcatccattttgctgtctcagccttttggtttctctgggcaccaaccatagtggctgacggaaggtatgctcaactgtcagtaatctacccctgtttcttggcatcaaggatgcttggaagtgctggttttccatggttttacggagccatagcccccttccggaacgaggacagcttgacaatagcttacgttggtgctggactcgctttgtcgattgcggcttatgattaccaggagattgcaccactggtgatagtgttctgcatcttccatgcttgtgtgggcttcattttgccgtcactggccagattgcgaacaatgtacctgccaaatgagctgcgagggggcatgatgagcttttcaatgtcactggcaaatgccgccaccttcgttttcttgatacagggcagcgcccaccatcgacgcgttgcaaactcaaccatcctgagccttgcgtcctatggcctgttaggagctgggggctgcgtccatatgttgaggaggtggaggaagcacactcggctgaatgcccgtagtctgtaggagctggaggcacccaatgaatgctatacacactgcagggtgaacttgagagcggtttctgtagcatgctagtatctcacgttttgtttatctgactttttctggaaatatcaggaggtaggtgtaggatactacttttgttgttgttcaaagaaattgttgaaattgaaggttgacaaaaaatctgtgtacatgcgtcggggccatcaaactaacgtctgactttgatttttagcaattaaactcgaaagccaggaatctgtgtatgtatgtttggtttgtagtttttttttccaagtgttcgtttcatacattgtcttgatagtataaaaatcgctcgtaccatacaaaaaaaaaaaaaaaa

SEQ ID NO: 5463 - DNA, 2740 bp, Zea mays
gcacgacgtcgtagtctagtcaagcccgaggcctttacctagatccccctcctcccggaaaatgcttctcctgcacaaatctgttcccctccgcctgctccttccacgccgtcctctcaaaacctttctcctcccgccgccgtctcgcccccgctgtctctcgctcctcccacgcgctgccatgggctccgtagctggagacaccgccgcccgcctcgcgtacccgccggcccgccgcgacgattcggtcgtcgacgactaccacggcgttcggatcccagatccctatcgctggctggaggacccggactcggaggagacgaaagagttcgtggcgcggcaggcggagctggcggagacggtgctcgccgggtgccccgacagggagaacctgcgccgcgaggttacgcggctcttcgaccacccgcgccacgccgcgccgttccgccgcgggaacaagtacttctacttccacaactccggcctccaggcccagagcgtgctctacatgctggatgatttggacgggaaggcagaggttcttttggatccaaatactctaagcaaggatgggacggttgctctttcaacatattctatcagcgaggatggaaactacattgcttatgggctaagtgaaagtggtagtgattgggtctctattcatgtgatgagcattactaacaagcagcctatgcctgataaattatcctgggtaaagttctcatctatcagctggacgcatgacgggaaaggttttttctatggtcggtatccagcacctagaggaggggaagtggatgctggaactgagacaaacatcaatcttaatcatcagatatattaccatgttttgggatctgatcagtcagaggatatattgtgctggaaagatcccgaacacccaaagtattcctttggtgcctcagtcactgaagatggaaagtacatcatattgggcatctatgaaggttgtgaccctgtcaacaaattatactattgtgaaatttcttctcttcctcaaggaatagagggctttagagggacacaggatttgcttccgtttgtcaagcttattgacaattttgatgctcaatatcaagttgtggccaatgatggtgatgaatttacatttttgaccaataaaagtgcccctaagaataagctggtaagggtaaatatcaaaaatccagagctgtggactgatgttctctcagagcatgaaaaagatgtgctcgaatcagccgacgccgttaacaataaccaacttttggtgaattatatgtcagatgttaagcatattctgcagataagagaccttagaactggaaactttattcatcagttgcctttggagatcggttctgtttcagagatctcgtgcagacgagaagacaaggaagtatttattggcttcacaagctttctttctccaggcattattttcaggtgtaacttagcatctacaatccctgaaatgaagatgtttcgagaaatttcagttcctggatttgatcgcacaagttttcaagttaagcaggtttttgttcctagcaaggatggaaccaaaattcccatgttcataatgtcgaagaaagatatcgatcttaatggatcgcatccaactttgctatatggttatggaggattcaacataagcataacaccttcatttagtgttggtcgcgttgtgctatgcaagaacatgggctttgttgtctgtgtagcaaacattcggggtggtggagagtacggggaggagtggcacaaagctggagcacttgcaatgaaacaaaattgttttgatgactttgctgcctgtgctgaattcctcatttctaatggttacaccagttccagacgtttatgtattgaaggcggaagcaatggtggtcttctggttgctgcttccattaatcagaggcctgatctctttggatgtgctctcgctcatgttggcgtcatggacatgctccgttttcacaagtttacaattggtcatgcatggactacagactatggttgttcagataaggaagaagagttccagtggctcattaaatattctccccttcataatgtacggagaccttgggagcaaagctctggtaataactgccagtatccagcaaccatgttgttgacagctgatcatgacgatcgtgttgtgccattgcattcactgaagttattagcaactttgcagcatgtcctgtgtaccagcactgaggacagcccgcagacgaatccaataattggtcgcattgatcggaagtcagggcatggagctggcaggccaactcaaaaaatgattgacgaagctgcagacagatatagctttatggcaaaaatgttaggggcttcgtggactgaatagtgaattttgtccagcttagtgtggagatggtgagcaagattactctatgcagtcaaagtaaagtgcctgtaaaagttatattgcttatgttttgctcttgcttggatgatcatccaccaaatagtatagtgtttatgcttcggtttgagataagggttcagggagcattgtcatgcttggcgttggtgcaccatttctttcatatatatcttttgattgttaaattttatacgttactacttcattgattctaaattataagatgttttggttttttcagataaaaaaaaaaaataatgctaaatcgcgaggggggccctatgtctaaaagaaaggtgaattgagattttttctttctttcat

SEQ ID NO: 5464 - DNA, 2828 bp, Zea mays
gagaccccctggccctattgggctgagatcagccactacttagcactatttccatactgctgtcatgctgttactgttacagtagatagaaaagacagcaaggttgaccttttgccaacttcctgctgtagcaaaacaagagaagaatgcagcagatgccccttccttttcgcccccttttttttttttttttttttttttttttttttgactaattggagaaattattattgaagcaggcatcttacatacatttcatgccatacagaagtttgaatgtcttattaacttctaaaagcaggaaataatgtaatgagattaacttattttgttcgctcacatgaagcacaatatgatctgacttaaggctattatacaacaatatatggggaacaaaaacaggtacaatagacattgttgatagctggtcttccaaggagctttacagcaaagaatctgtctttgcaggtagcctcctgaagaagtttgctggtgctgatggcaccttgtggcgaaaccgaggatgcctcatcccgaagaacccaaggcagagtgcaaccacttggaatggtgtcacatacagtataatcgcagtaatcaggcaaaatatcaggaacatagctgttgcccttgggtccctccagctgagcagtgactgtaatctttctccctgagtggcaatgtccccaacaacagtctgtatcctcccagcaacgtgtcgtaacctatcgtacctcatccggatgagatctgggctctttgaggttgggaatgtgtcaaattcctcatcaagctcatctggaagtgcaacatcagcgtaagatattcttgtgttcatgtgtggtgggaagcgtggccggaaccggtaattccacagccctatcaagaacatgtagaggaaaattgttggcaggataaggtctggatagagcacaagcatgataaagagcacatggaccagcactgtggtgaccgggtttttccactgacaaacatcagcaaaccatttccctgcagcaatgaaccctgagaagacttgcataaggcggaagaagttagctttgctccgtcgcatgctccacaggtgagagcgagcatctgacataaactcaacaacttccctgcggactggtggctccatgcgtcccaggcgctgcgcaacaagcagcacagcttggtggcggagcatttcctgctgaactattgacagaggctgtgcgtagtgcatcttgggcaagagaggcctagagtatgtgaagagcacattgataagggatgtgactgtgaaccggatggcaaggtggagctcacccatctttttaactcctgatgggctgaggaagagcaatggatatgagtgcgtgtacacacgcgccgtgtcaagtgtcgaaagccgaatcctcactttcccgatgggtttatccatgtggcctgaggaaccgtccttgttatcatctccacttatgtgacagttgtcaaatagaccaattgtgagcacagttccatgatcaaagacctcccatgtgtactgctcgttgaaccgagggctcaagctgtcgactatcgtgcgcgtccggacccatttggaaccatacttggcaacacagtacgcatcacacgacccacggctgtttctggtcttcgttggattgagaccgttcgcacttaagatgccgacttcaagcatgccgattggtggcttccacagctgcttcatcgtcggacggagatcgctgcagtactgtgtggactcatcaagcacatggtaaccaccttcaaggcagacacgaaggcttaccttcgcatagaatttgtcttccttcagctggttcacgtcgatgatccctggccttcttagatcgaaccatgctgggagtaccggtttgtgatcagcccgccttggaagcctcgcgagcggtatgatagcctcaccaatcacctcgtctttgtcttgtgccacacggtctactactgatatgagcaagtcgtcctcaaacggctctgctgccacgaacatcagctcctcgttccacatgaagtttctggtcggcgagcgaacctgccttgtcctcagcagttgatggcccagcctcacttttaccagcacatcaggtatgcggttctccattgggtatatgtcctgtccctcaatcacattgactctcacataccacattcttggcgcggggtacaccttcccgcggatgtagctgtgaagatgggaatcaaccggtgtcgatcctgcatggatggcgcttgggaagcattcatctgcctgagtaccgtaccagactgcaagcatcagctcccctctgtccctcacgccgtccttgcccatcagacggtaccactccggtgccagtgggctgtccggagggaccctgagagggacctcattcagatcaatgctcactcggccgacatacccggcccgaaggacatccttgtccttcacaacgacttgaagcatcgtcgactgcatgacttccttggggaacgcgaaaacctcgtcccactcaggcctctggttcttctcaaagtgctttgtcttcatcttgtagtttccaaggtgcacctccacgtaagggtcaaggcttccagtgatgtccatgttgggcagatcgcgtgccttgaccacgcgcacgaagaggtactgcatcttctcgacaaggtcgtacgccccagccttctggccagggtacacccggccgccaatgacacggccgccgccaagcgttgggcttgtttccttgagctggaagtctacaggctgctgtggacctggagcatacatccttgacacctgaacctgaggctgaggggctgca

SEQ ID NO: 5465 - DNA, 3459 bp, Zea mays
cggacctggctacgaagcgcaggcagtacagacagcaccgcctggtttgagcggctgccgccgctgcatatactccctccctgccttccagtgccaggggtgaccggcgtgcgtgccattccacgctctcgcggctcgtgtgccagcggtgaccagcgctcgtgctcgtccagtccaccaggcgctgctgttccggcaagccagccagcagcagccgccgccgccgccgtctcggagctcgagctcctagtcccccggggccgaggcgccggcgccatggaccagctccggcccgagccggccgcgggcgcgcacgagatcgagaagacggcggcgccggacgtggagtcggagcccgcggcggcggtgccggagccggagcgcgtgccgccgtggcgcgagcaggtcaccgcgcgcgggatggtggcggcgctgctcatcggcttcgtctacacggtgatcgtcatgaagctgagcctcaccacggggctcacccccaccatgaacgtctccgccgcgctgctcgccttcctggcgctccgcggctggacgcgcgccctcggccgcctaggcattgcctgccgccccttcacccgccaggagaacaccgtcgtgcagacctgcgtcgtcgcctgctacaccatagggttcggcggtgggttcgggtcgttcctgctgggcctggacaagaagacgtacgagctctccggggtgagcacgccgggcaacgtgccggggagctacagggagcctgccatcggctggatgaccggattcctcctcgccgtcagcttcgtggggctcctcaccttgcttccactcagaaaggtgctcgtcatcgactacaaactcacttatccaagtgggacagccaccgcggttctcataaacgggttccacacacctcaaggagataagaatgcaaaaattcaggtccgtggattcctcaagtacttcgggatcagcttcctgtggagcttcttccagtggttctacaccgccggcgaccactgcggattcgcccagttccctactttcgggctccaggcttttaaccagacgttttccttcgacttcagcctgacgtacgttggtgctgggatgatctgctcgcacctcgtcaacctctcgttgctgttcggtgccgtcgtttcctggggcgtcatgtggccactcatcggcaagcagaagggcaactggtatccggcagatgcatctcagaatagcatgacaggcatctacgggtacaaggccttcctttgcattgcccttctcgtgggagacggtctctacaacttcgtcaaagtcatagctatcactgtcaagaacatacgcgagagatcacgtcgcaagaacctgaacagagtggcggacgcggacacgatggcgctggacgacatgcagcgcgacgaggtgttcaacagggacaacatcccgacgtggctgtcctacgcggggtacgcggcgctgagcctgatcgcggtgatcgccatcccgatcatgttccgggaggtgaggtggtactacgtggtggtggcgtacgcgctggcgccggcgctggggttctgcaacgcgtacgggaccgggctgacggacatgaacatggggtacaactacgggaaggtcgcgctgttcgtgctggcggcgtgggcggggaaggacagcggcgtggtggccgggctggtggggtgcgggctggtgaagcagctggtgctcgtgtcggccgacctgatgcacgacttcaagacggggcacctgacgctgacgtcgccgcggtcgatgctggtggggcaggccgtgggcacgctgatggggtgcgtcctggcgccgctcaccttcatgctcttctacagggcgttcgacgtgggcgagccggacgggtactggaaggccccctacgcgctcatctaccgcaacatggccatcctcggcgtggagggcttctcggcgctgcccaggcactgcctgcagctgtgcgcggggttcttcgcgttcgcggtgctggcgaacctggcgcgggacctgctgccgcgccggctcgcgcggctcgtgccgctgcccatggccatggccgtgccgttcctcgtgggcgccagcttcgccgtcgacatgtgcgtggggagcctcgtggtgttcgcgtggcacaggctcgacggcaagaaggccgcgctgctggtgccggccgtcgcctcggggctcatctgcggcgacgggatctggacgttcccgtcgtcgctgctcgcgctggccaaggtcaagccgcccatctgcatgaagttcacgccagggagctagagggcgcgctgacgatgcgtacagaacagagggcatcgttcgtcgtttgtggggtggaatccgtgtagtagaattacataccaatcaggcctgttctaatgtccatatgagcttaatgtacggtgtatatatgtaaaacggaaatctgaaggatgacaggatgaattgcctgttgtctagtagcacgcatattattattattatagcagagcactaataaaactctttatcttacacaaagtgttactgcaactgcaatgccccaacgctgttcagcagatcctggtgcgctcagccctcttccgctgcagtggagcagcttcactcagcggcaccgtttggaagttgaaagagaaaactgagcacggcatctccgtccgtgcgcagtgcatggcacagtcgtcggtacgcgcccgcctaacccgtcggcatcaacgatgatgcttccttccacagccacggttcgctcaacttgcccaacggttcctcagttggcaccacacacagattgtggttgtggccggtggggtgcggtacctctccgcctttttggcgtttggtgcctcacgccgccactacctacaggcggctagaggttccaaactcgctgacaattcgacacattgaatgaatcgatgctcgatgaaggatgcatgcatcaaaaagggtggccggcgtgcctcgtctctgccgtcacttctgttctcggtgacagacgtccccaagctttgcccctctcgttgcttcggtggtgctgtggagctctgaacaagagggcacggacattctccggttaccatcaacctcccgtcggtagtgaaggttgctgtcgtgctacactcggtggtcgtagcgggataggcttcactgagcaatcggatagatcgggactctgtatacgcgcatcgttttgcactatcatgataacggaacagaataatctagatgctgctgtatccaatccaactgcaccggcgactgaggaggagagctggctaagcaggaccgacgaatttttcccccgtctgtcaactccacgtccacatgcgtgagtcaccgtgacaccgtcctgtgcgtgagggtgatatccaaacggaccacccgaaacggatatattgaagcacgacccatttagcacgacacacggctagatccgaataatta

SEQ ID NO: 5466 - DNA, 1962 bp, Zea mays
cattgggtacctcgaggccggccgggagcaagagtgggcacctccgcgcccgcccccctgcttcctgcttttcgtcctcacctcccttcccccactctcttctctccccgcggcccgtgactcatccacccacagtccactcgccactccccccggaacggcggcggcggcgacggcggaggagtaacgcaagatggcgaggaaacctctcgactacgaggagctgaacgagaacgtcaagagggtgcagtacgcggtgcgcggggagctgtacctccgcgcctccgagctgcagaaggagggcaagaagatcatcttcaccaacgtcggcaacccgcacgccctcggccagaaaccgctcaccttcccgcgccaggtggtggcgctgtgccaggctccgttcctcctcgacgatccccacgtcggcctcatgttcccggcggacgccatcgctagggccaagcactatctcgccatggcgcccggcggtctaggtgcgtacagtgactcccgcggcatcccgggaatcaggaaggaagttgccgacttcatccacaagcgtgatggatatcccagtgatccggaactcatctacctcacagacggtgccagcaaaggtgtgatgcagatcctgaacaccatcattagaaacgagatggatgggatcttggtccctgttcctcagtacccactttattccgccaccatttccctctatggtggttctctggtcccgtactacttggaagaagaggctaactggagcctcgactttgtgaatatccggcaaacagtggcggaggcacggtccaagggaatctctgttcgagcgatggtgatgataaatccaggaaatcccactggccaatgccttagtgaagcgaatataaaggaacttctgcaattttgctaccatgaaaacttagttctgctagcagatgaagtgtatcaacagaacatttatcaagatgaacggccatttataagcgcaagaaaggttatgttcgacatgggtccaccaataagcagtgagcttcaggttgtttctttccacactgtgtcgaaagggtactggggagagtgcggacaacgtggtggatacttcgaaatgacaaatcttcctcccaagacagtagatgagatctacaaggttgcatcgatagcactgagtccaaacgttcctgggcaaatttttatgggagtaatggttaaccctcctaaacctggagatatctcgtacctgaagttcgctgctgaaagcaagtccatccatgaatctttgaggaggagagcacgcatgatgacagatggtttcaacagttgccgaaacgtcgtgtgcaatttcactgaaggagctatgtactctttcccccaaatacgtctgccaccgagagctattgaggcggcaagaagagccggcaaatcagcggacgtcttctactgcctcaagctcctggaggcgacaggaatctccactgtcccgggctctggttttgggcaaaaggaaggggtgttccaccttcggaccactatccttccagcggaggaagacttccctgccatcatgtcgagcttcaagaagttcaacgactcgttcatggagcagtacgagggctactccaggctgtgagcaggaagagaaacaagagtttacagatctgaagaagagattattgattggaagcttattagttattgtaactcccttgaaaagcaggttgtgcggggattattgtttattgaataaaaagtccgccatttgattctactgccataccagtatatataattgtgaattggcttgtacttgctgctggtggggagaggtggaaatagctagccctccttgaccgcgcgcgataagaatgtcgcctcttgttctggagattattggagagttgaatagttcataatcagcctacctacaatatattgcagaaaaagtactgatcagtcccggcc

SEQ ID NO: 5467 - DNA, 2865 bp, Zea mays
gcacgagaccattacctacccgccggccggcgcggcagttcgccaccatcgtgctccgtacacgctccgctccggccatggccgccgccgcggcctccttttcggccctgccgttccttctacttttgctgctggtgccgtcgctcgacggcgcctccaatgtgacgtacgaccaccgctccctcatcatctccggccgccgccgcctcgtcatctccacctccatccactacccccgcagcgtccccgagatgtggcccaagctggtggctgaagccaaggacggcggcgccgactgcatcgagacctacgtcttctggaacggccatgagatcgccccaggccagtactacttcgaggaccggtttgacctggtgcggttcgtgaaggtcgttagagacgctgggctgctcttgatcctgcgcatcgggccctatgtcgccgccgagtggaattatggaggcgtgccggtgtggttgcactacgtgccaggaacggttttcaggacaaacaacgagccattcaagaaccatatgaagagtttcacgacatacatcgtggatatgatgaagaaagagcagctcttcgcttctcagggagggaacattatcctagctcagatagagaacgaatatggagattattatgaacaagcgtatggagctggcggcaaaccatacgccatgtgggcagctagtatggctcttgctcaaaacactggtgtcccttggattatgtgccaagagtctgatgcccctgatcccgtgataaactcttgcaacggtttctactgcgatggattccagccaaattcgccaaccaagccaaaaatttggactgagaattggccaggatggttccagacttttggtgaaagtaatccccacagaccacctgaagatgttgcattcgctgttgcacgttttttcgagaaaggtggcagtgttcaaaattactatgtgtatcatggtggcacaaattttggtcgcactactggggggccattcattacaactagctacgactatgatgcaccaattgatgaatatggacttcggagatttccgaagtgggcacatctgagggaacttcacaaatctataagattgtgtgagcacaccctgctttatggaaatacaacgtttctttctctgggtcctaaacaagaggctgatatttacagtgatcagtctggaggctgtgttgcattcctggcaaatattgattcagccaatgacaaagttgtcactttccgtaacaggcaatatgatcttcctgcttggtcagttagtattcttcctgactgcaggaatgtggtgttcaacactgcaaaggtgcaatctcaaacttcaatggtgaccatggttccagaaagtttgcaagcatcaaaacctgagcgatggagcattttcagggagagaactgggatttggggtaaaaatgactttgtccggaatggatttgtggaccatattaatacgacaaaggactccaccgactacctatggtacacaacaagttttagtgtggatggaagttactcctcaaaagggagccatgctgtccttaatatcgactccaatggccatggtgtccatgctttcttgaataatgtgctcataggtagtgcatatggtaatggctcacaatcaagattcagtgtcaaattgaccatcaacctgaggactggaaagaatgaacttgcccttctaagtatgactgttggtttacaaaatgcaggattcgcttatgaatggataggagcaggctttacaaatgtgaacatctctggtgtgagaactggaatcatagacttgtcttcaaataattgggcatacaagattggactggaaggggaatattataatttgttcaagcctgatcagacaaataaccaacggtggataccacaatccgagccaccaaaaaaccaacctttgacatggtataaggtaaatgttgatgttccacaaggagatgacccagttgggatagacatgcagtctatggggaaaggcttggcttggttgaatggaaatgccatcgggcggtattggccgaggaccagttctattaatgataggtgcactcccagttgtaactacaggggaacatttattccagacaagtgcaggacaggttgtggacagccaactcagagatggtaccatatcccacggtcatggtttcatccctcagggaacatcctcgtggtctttgaggagaagggtggggatcccacgaagatcacattctcaagaagagctgtgacgagcgtgtgctcctttgtgtcagagcacttcccttccatagacttggaatcctgggatgaaagtgccatgaacgaaggcacacccccagccaaagcacagctgtcttgccccgagggtaaaagtatatcttccgtgaagtttgcgagcttgggaaaccccagtggaacctgtagatcataccaaatggggcgctgccaccacccgaactccttatctgttgttgagaaggcctgtctgaacaccaacagctgtacagtctccctgacagacgagagctttgggaaggatttatgccctggagtcaccaaaacactcgccatcgaagcggactgttcttagtgacctacggagtacgaagtactcggtgtgcatctaggttccactgcaagtatgcccgtcaaaattctaaaattgtagtgcttgttgcacggcaatgctattgtaacctggatttgaatgtatccatctgagataggttatgtttcaggagctttcttaaactaacgttgttgctgagcagcatggattgaaatagcaggctatggcaaatgacggctaaaaaaaaaaaaaaaaaaaaaaaaaaaaaaaaaaa

SEQ ID NO: 5468 - DNA, 1055 bp, Zea mays
gatttaatgtgttattatttttgaaatattttttacttgtagtcatttaatttttaataacgcatatgaatctctaaggttttattacgacaaaaaatactcacacgttacgcgtttcggccgatcttgtccgcggtctgcctccctgacttttgttggcgctagccgtgtcggcccgggccggccaagtcccaagtcccacccaccaaacccaacacatcgtgtctgcgttctccccctttacgccggcgagtgttcgtcgctggctcgctgcagcggggagaatagaggcagagagcagggatgagcgacgagcgggtgaaggcggaggcgctgcagatcctgggcctattccaggtgctcccccgcctcgtcgtcttcgacctcgactataccctctggcccttctactgcgagtgccggtccaagagggattcgccgagccttttcaggcacgccaggggcatcatgtacgccctcaaggagaaggggatcgacatggcgattgcttctcgctcccccaccccggacatagccaaggtgttcctcgacaagttggagttccagtccatgttcgtcgcccaagaaatattctccagctggactcacaagactgagcatttccaaaagatccaaaggaaaactgggattccctacaaatccatgctgttctttgatgacgagaacaggaatattgaagcagtatcaaaaatgggagtgacgagtgttttagtagagaacggggtgaaccttgacatgtttaagctgggtctcagtaactttgcaactaactgtgctgcctccagcagaaaggatgacgaataacctcgagaagtgatacatagaagaaaataccttcaaaacactgtactcgaattcattgtaatcaatttgcccgattcatgaacaatttattggtgaaagatgacctcacagactagcttttgaactgatgcaacgcctgtctaatatatttatttgaaggcaaatcactccatgtcattatttcacgtgcaaagcaaatatattggtgcatatcaattttgtggccccta

SEQ ID NO: 5469 - DNA, 2332 bp, Zea mays
  misc_feature (2311)..(2311): n is a, c, g, or t
ttttttttttttttttggtaattagcgaatatatatatatccatatttactagacaagccccccgggcccccagatccgtccacccccacgctccgatccagcccgtccagttcgacgcgaagcggatcgtagccgtccgaatccgaggggtggacccgtgaattccgggaaggacgaggggtagttggctaccggttaaaacgcccgtgccagtggcccccgtcttcctcctctcctacgcgggcggggaagccaaggaagaagtagtagtagttcgctggaggagttggcctcgtcctcggatccagagcgcggaaacccgtgcgcgcgtccggatcgacccgctcgctcgacggccgcgggcgcgaggctagggatcaggatcggcggcggcggcggcggcgatggggaagtccgtggtggtgggcgcggcggtcgtggcgtgcgcggcggtgggggtggcggcggtgctggtgcaccgccggcgcaggcgcgacgccgcgctcctggggtccgcggaggcggagaggaggcggcgcgcggccgccgtgatcgaggaggtggagcgcagcctcgccacgcccacggcgctgctgcggggcatcgcggacgccatggtcgccgagatggagcgcggcctgcgcggggacatccacgcgcagctcaagatgctcattagctacgtcgacaacctccccaccggagatgaacatgggctgttttatgcactggatcttggagggaccaacttccgtgtgctgcgagtccaactaggaggaagggagaaacgtgttgtcaaacaacagtacgaggaggtttccattccaccgcatttgatggttgggacttccattgaactatttgatttcattgctgctgcattggctaaatttgttgatactgaaggtgatgatttccacctcccagagggtaggcagagagaacttggtttcacgttttccttcccggtgaaccaaacatcaatatcatcaggaacactcatcaagtggacaaagggcttttccatcaatggcacggttggtgaagatgttgtttctgagttgagcagggccatggagaggcagggactagatatgaaagttacggcattggtcaatgatacagttggcacattggctggtgggagatatatggataacgatgtagttgcagccgtaatattgggcactggtacaaatgcagcatatgtggagcatgcaaatgcaattcctaaatggactgggttactgcctaaatctggaaacatggtaattaatacggaatggggaagctttaaatccggcaagcttcctctctcagaatacgacaaagccatggactttgaaagtttgaaccctggagagcagatatacgaaaaaatgatttctggcatgtatctgggagagattgttcgaagaattttactcaagttggcacatgacgcttctctatttggagatgttgttccaactaagctggagcagccatttatattgaggacgccagatatgtcagccatgcatcatgactcttcgcatgacctcaaaactcttggatctaaactgaaggatatagttggggtcgcagatacttccctggaagtaagatacattacccgtcacatctgtgaccttgtcgcagagcgtggagcacgcttggctgccgcaggtatatatagcatcctgaagaagataggccgggacaaagtaccaagcagtggcagtaaaatgccaaggactgtaattgccttggatggtgggctctatgagcattacaagaagttcagcagctgcgtcgaagcaactcttacagacttgctcggcgaagaggcctcttcctccgtggttgccaagctggccaacgatggctctggcattggagctgctctccttgcagcctcacactcccagtatggcgagagtgactagtcttgaaaactggtgtggatcgaacttcgagtgtagctctcatttttatctttttttcccttcaaaacatccctaatattccggctctcctcggggaatttttcggcttcctttcttggctattctgtggatgcacttaaggctctgcagcgggatatagctagtatagagccaatcagtttggaggttatctaatggcataaggtttggacggcaggaacatagaaatggaagctgaacaatgccattcatgttctgcccagtttttcttctccttgtatggtgttgtaaaccaatcaaaacttttaacctttttgtgttggcaataaagaggaggcacgataatttgaccaaaaaaaaaaaaaaaaaaaaaaaaaaaaanctcgagaaaggccgcggtacc

SEQ ID NO: 5470 - DNA, 1813 bp, Zea mays
  misc_feature (1791)..(1791): n is a, c, g, or t
ccggccggggtcccagtcccgcgcactgcccccggtctctctctctcaacacaccgataagcccagtccaccggatctcccgtagtccagagactgagttgaaggaaggaagccatgatgatgatgggcgaaggcgtgagcatgccgccgtggtcccaccacgtccctgtgagcggcgtcgacgaaggcgacgagatgacgccgtacccgcgacccgcgcaagtaccactactccggcgccgcctgcccggacttccgcaagggcgggtgcaagcgcggcgacggctgcgacatggcgcacggcgtcttcgagtgctggctccacccggcgcgctaccgcacccagccctgcaaggacggcacggcctgccgccgccgggtctgcttcttcgcgcacaccgcggaccagctgcgcgtgctcccgcccacgcagcagcagcagtccagccccaggggcgccgcctgctcttccccgctcgccgagtcctacgacggctccccgctccggcgccaggcgttcgagagctacctcaccaagagcatcatgtgctcgtcgccgaccagcaccctcctgtcgccgcccaagtcgcccccgtcggagtccccgccattgtcgcccgacttccgccgtgggtgctggccgggcgccgggtcccccgtcaacgacgtcctcgcctcgctccgccagctccgcctcagcagggccaactcgtccccgtcgggcgggtggtgcggctaccctgcatccgcggtcgcgtacggatcgcctacggggggcgcgatctacggcctgtcctccaccccgagggccaccgccgcatccggctacatggccaacctggaccctctcgacgtcagcttcggcggcgacgaggagcccgtggagagggtggagtccggccgcgccctccgcgcgaaggtgttcgagcggcttagcagggagggcgctgtttccggcgacgccggtggccccgacgtcggttgggtctccgacatcatcaactgaggcggcggcgggaccctggcatggcagtggcaatggcaataacaatgggcacggagaaaggtgatggtgagccgtaacggagaaggatggtatccaaaaaaaatatttccctatatttaatttcgttcctcagttaaatccgataatccccgtgtacatatctatcaccctgtgaatattctcagttggtaagagggaggatgctaggtggtggaagtggaaggaggggtggatttgttttggggttcttgaggtagtagaaaatatccaagaaaaatagaaaaaaaaagtgtacagcagatgcagtaggcggtggcggtggttgtgtccctcttctgtgcatagggttagggtgttggtggcgaagcatggcggcggctgatgtgacgacgaaggcgggccggatttccaccacggcttggtatttctgtgattccggaacatggtagtttgatgttgttttttttaagttagtggactagttggcgattgcaacctgcttgtggattactctcccattttgttatgtaatctgttaagacatcagcattccctacagcatattttgtgtacctacatcttagtagttgccgaaatctcaatcaaaatcacccgctattggaggtgaatttcccatgtaatcttctgctcatgtaaatggttttctttttaatgaatcgatgtttatcgccctgaaaaaaaaaaaaaaaaacccgcggcaaaaaaaaaaaaaaaaaaaaaaaaaaaaaaaccaaaaaaagaaaaaaaaaaaaaaaaaaaaaagnactcatcgttgttacccctgtt

SEQ ID NO: 5471 - DNA, 844 bp, Zea mays
cccggtttaaaagttgggtacctcgaggccggccgggacttctagagtttagctatagcctcactgctagagcgccgccatggctcaggtaaggggcagtgctcgtggcactggcagtggcagcagcgccgccgcgctggcgctggtcctcctgtgcgcgctcctccgcggcgagttcgccgagtcggcggtgtacacggtcggcgaccgcggcgggtggagcttcaacaccgccagctggcccaacggcaagcgtttccgcgccggcgacgtcctcgtgttcaggtacgacgccagggcgcacaacgtggtgcccgtgagcgcggcggggtacagctcgtgcagcgcgcccgagggcgccagggcgctcgccaccgggaacgaccgcgtcacgctgaggcgcggcgccaactacttcatctgcagcttcccaggccactgccaggccggcatgaaggtcgccgtcaccgccgcctaggcactgcagggcggccaatcagccggcggagagcgccgcgctcacggagtagtaaagcacgtagctaattagacggtgctgcccttgttgttcaataatatcgtctgtcgtcccgtacttcataacctgcgcggcgtgttagtagttgtttggtggtgtttggcgactggcactataaagaagggtcagatcgagtgatgtacttgctaccaataaaggtatacgggtttgtgtgttcaaaaaaaaaaaaaaaaaagcggccctattccaaacctatagagagctaatggctaattaaagtgtaagcggccgttgagaaagtatattaaataattagctagcctaaaaaaaaaaaaaaaagcgggc

SEQ ID NO: 5472 - DNA, 2491 bp, Zea mays
ttcctcctcgcccaccaccaccgcacgccggacaaaaccgctctcctcgccacattcgcagcccccctcgctcgcgcacacgccacaccacaccaccagtacactgctctacgccggcccggacagtacagcagcgggcggctggctgcctaatctctccagctctttcgtcccctcgccacgccgcccaccgctgccgcatcatccgcccgttgcccgccgtcgtcgcctggcccgcggcttccgcccccattcgccgtcgcagcgcgccgagccccgtcccagatcgccgcggcgcttcctgccgccgtcggcgcggcgcagggttgaaatctatttgaccactcagttataaccatttctggtctgaagatgcttcgtcaatgacatctggaaactgtaatagtatgcgctgatcttctatgcttcaccacctgactatcaatgggctctttcctgtggaaacagcccagctacctcttcattttgataattcttcaccttgttgctcatgaggcaagaacgctgagttcagatggtgaagcacttcttgccttcaagaaggcagttacaaattcagatggagtctttctaaattggcgtgagcaagatgcagacccctgcaattggaagggtgttagatgtgatagtcatagcaagagagtgattgatctgattcttgcataccacagattagttgggcccataccacccgaaattggaaagttaaatcagttgcaaaccttgtcactgcaggggaacagtttgtatggttcactccctcctgaactggggaattgtaccaagctgcaacaattgtatctacaaggaaattatttaagtggatacatcccttcagaatttggcgatctggtggaactcgaggcattggacttgtccagtaatacattgagcggatctgttccacattctcttgataagttgtccaaacttacatcattcaatgtttccatgaacttcctgacaggagccataccatcttctggttcacttgtcaatttcaatgagacatcctttgttggcaaccttggtttatgtgggaagcagataaacttggtgtgcaaagatgcacttcaatcaccatcaaatggtctgcagtcaccttcaccagatgacatgattaataaaaggaatgggaagaattcgaccagacttgttataagtgcagtggcaacagtgggagctctcctattggtggctttaatgtgtttctggggttgctttctttacaaaaattttggaaaaaaagatatgcgtggtttcagagtggagctctgtggaggctcttctgtcgtgatgttccatggggacctcccttactcctcaaaagacatcctcaagaagctagagactatagatgaagaaaatatcattggagcaggaggcttcggaactgtttataaacttgcaatggatgatggcaatgtctttgctttgaaaaggatagtgaaaacaaatgaagggctagatcggttctttgatagagaacttgagatattgggaagtgttaaacatcgctatttggtcaatctccgtggttattgcaactccccttcatcaaaacttttgatatatgattatcttcaaggtggaagtctggatgaagtgcttcatgaaaaatctgaacagttggattgggatgcacgtattaacattatacttggagctgcaaaaggcttgtcttacttgcatcatgactgttcgcctcgaataatacatcgtgatattaagtcgagcaacatcttgcttgatggcagtttcgaggcccgtgtatcagactttggacttgcaaagcttttagaggatgaagaatcacatattactacaatagttgcaggaacatttggctaccttgcaccagagtatatgcaatttggcagagccaccgagaagactgatgtctacagttttggggttttggtactcgaaatactcagtggaaagcggcctactgatgcatccttcattgagaagggactaaacattgttggatggttaaattttctggctagtgagaaccgggagagggaaattgtcgacctgaactgtgaaggagtgcagactgagaccttagatgccctgctctctcttgccaagcaatgtgttagctcctcgccagaggagaggccgacaatgcacagggtggtacagatgctggagtcggatgtaattacaccgtgccctagcgacttctatgattcagagtagtctcctggacaagccacgctgctgctagtttcccgtgggggcgcattcctttattctttgcgtatattgtgtaaatgcattgccgcggtgtttggtctccaatcggctggctcaacgggtgacttttttttgcgtctgtatacctatgtatgtatctgtcatggtacaagttggctatatgctgatttaataataagagagaacttactagtaaaaaaaaaaaaaaaaaaaaagacggggggcccggtacccaaaaaaaaaa

SEQ ID NO: 5473 - DNA, 2188 bp, Zea mays
ggccgcttttttttttttttttttcaaaatgaggtttataataataatataataaaaactccaggccaccgactggcctcgccgccggcccccgattccccctccccctccccttctgccccccggcaagacggcaagggattaacaacctaacctgactcgtggcgggacggatgacatccccaaaaccctaaccacgcgacgctcgccgactcgccgtcacagccgcacctcaaccggagtcgaagcgccattgatgaactccgagcctgccgtggccgcagctagcgatgcacaagctcctcccacgcgccgcctccttcctcgacgcagccgccgccgcggcccccctgctgctctccttcccacgcatgcccacgctgcggctgtctggtagcccattcgtagccatgcgtcctggcggaaaccctagccgtatccgtgcgccgccgtggctgcactgtgacgctgggtggaggcggggactctgttccgccgaggctgcgaggcgcgggggcgatacagaggagatggagaaggatggcgggggtcgctcggcgccggagaggaagcagagatgtcggaatgatgcgctggtgggaaggggggagctgcttaccattcccggagtcgggccacggaacctgaggaagctcgtggacaagggattcgatgacgtggcgcagctcaagcagctctacagggataagttctttggcaagtctaatgagaagatgattgaattcttgcaaaattcagttggcatcattcacaagaatcatgctgagagtataactttgttcattaaagagagtgttgatgaagagctgaaaggcaccgatacatctaagcttcctaaaaataggaggttgaccttttgtatagaagggaatatcagtgttgggaaaactaccttccttcaaagaatagctaatgaaactatcgaactacgtgaccttgtagaaattgtacctgaacctattgctaagtggcaggatgttggccccgaacacttcaatgtacttgatgctttctatgcagagccacagaggtatgcatacaccttccagaattatgtatttgtgacaagggtcatgcaagagaaggaatctgcgtgtggaataaaacctcttaggctgatggaaagaagcgttttcagtgatcgaatggtttttgttcgtgctgtgcatgaagcaaactggatgaacgagatggaaatcagcatttatgactcttggtttgacccagttgtgtcatcactcccaggtcttgtacctgatggttttatttatctaagagctagccctgatacttgtcacaaaagaatgatggtgcgaaaaagatcagaggaggctggtgttactcttgattaccttcgaggtttgcatgagaaacatgagagctggttacttccatccaagggaggaggttctggcgtgttgtccatcagtcagcttccagttcatatggagggctccctgcatgcggatatacgagatagggtattctacttggaaggagatcacatgcattcaagtatccagaaggttcctgctcttatcctggactgcgaacatgacattgattttaacaaggacatcgaagccaaacgacaatatgctcggcaagttgcggagttctttgactttgtgaagaaaaagaaggaatctcttacagcagagtcagagacggctgatggtgataagagtataaacaaacagattgtgctgccgcacggaggtggtttgtgggtgcccggaagcagcccgttaccagaatcagctctaaaatcatttgatttcaggagaacgatgtcttcctcgacttaaggtgggcaaacatcccaatggcgctatcaatttctgccgacaacctgcattggtgtggtccagcagcgtatctcgattgatatatatataccctgtaaatctttaaagattatataaagatttaggcttttagctagtgttggcgtacaatgtattatactagtggtatccaactctgttgcctgtagatgatcgagctgctttctgtttgcctggaaatgttgatcgaaccgctttcgagacagtgcttttgtaaatttggggtgcatcataggcgcagaatcttttgttttatcgttgtctcgccgcacaatctcacttctctggtttgttattagttactgggtgtctgattggtt

SEQ ID NO: 5474 - DNA, 1051 bp, Zea mays
ctcgaggccggccgggccggggtcgggtgatgagttgcatagttcagatgatcaaccctcgtggttctgattacatttaagtaattacgcctccccgccggccggccgggccggaaccaatccataactcgaaaccttttcttgtgctctgtctgtgtgtttccaaagcaaacgaaagaggtcgaggatgtcttgcagctgcggatcaagctgcaactgcggatcaagctgcaactgcggcaagatgtaccctgacctggaggagaagagcggcgggggcgctcaggccagcgccgccgccgtcgtcctcggcgttgcccctgagacgaagaaggcggcgcagttcgaggcggcgggcgagtccggcgaggccgcccacggctgcagctgcggtgacagctgcaagtgcagcccctgcaactgctgatcctgctgcgttgtttcgtttgcggcatgcatggatgtcaccttttttttactgtctgctttgtgcttgtggcgtgtcaagaataaaggatggagccatcgtctggtctgactctggctctccgccatgcatgcttggtgtcggttctgttgtgcttgtgttggtgcatgtaatcgtatggcatcgttacacaccatgcatctctgatctctttgcgccagtgtgtgtgactatgtccctgtaacgattggctcagtgattgaatatatatacaatactgttttactaaaaaaaaaaaaaaaaaaggacccagggcccggcccccataaagccacccattcccgtaacttggccggttccacacccgttttcggcctgcttttaaaatgcccctaactccggggggggtccccaagcacattttttttgtgacaggtcctttttattaattaataaaagggccttattccaacgaacggtggttccagttttggacccggttccccccttggaaacttataaaaattcctccccccgaaaatggatcttttttttcgaccatgtgtttccccccgccccctccctgttcttcgctggtgggcgtataatttctcgttcccgtct

SEQ ID NO: 5475 - DNA, 1423 bp, Zea mays
  misc_feature (1)..(2): n is a, c, g, or t
  misc_feature (4)..(5): n is a, c, g, or t
  misc_feature (9)..(9): n is a, c, g, or t
  misc_feature (17)..(17): n is a, c, g, or t
  misc_feature (24)..(24): n is a, c, g, or t
  misc_feature (27)..(27): n is a, c, g, or t
  misc_feature (34)..(39): n is a, c, g, or t
  misc_feature (41)..(41): n is a, c, g, or t
  misc_feature (43)..(43): n is a, c, g, or t
  misc_feature (49)..(50): n is a, c, g, or t
  misc_feature (54)..(54): n is a, c, g, or t
  misc_feature (56)..(58): n is a, c, g, or t
  misc_feature (60)..(62): n is a, c, g, or t
nncnnctcnctataggnggaattnggnaccgggnnnnnncncnaggtcnncggnannnannntttttttgaatggttttagaaacaataacatccatactatatcacaactgtatgtatgtccactaaaacatcgcacagctcatctctagacaaactagtcatccaaaatcacatcaaggcatcacacacacatacacagcaggccaagatctctggcgagtgtcttggttgtcgctaaaatcattactgcgacagaacttaatttctatggcgaagatagagatgttacacaattatttaacaaagtcacaaattacaaggaagttaattaccatttcaccttcaatcgatggcaacatataagacacagcaaacaaaactatgcacattataggccacttgtggttagagcagattgcaacacatcttctaggtacttctctgcggctgcatactgcctctttttgtcctctatagctagtgcagctaaagctttatctggaggtaaatcctggtagctccttaatgtgtcagctatgggtttagtcttcctctcgagatccttcttatgctcagccatttccatcaacacaccatgattgatctctggcgtataacccactcgattaagcattgccttataatttgagacttggaggatatattgccgttccttggagtccatcataacaagctttgtttgccaatcagtcatttgctccacttgttgcttctccacatcattcttaaatttctccagcatcttcttcagctcagtaagcttgtttatggccttccgtgtgtagtcaagtagtgccttggactccttatgcactttgtccctcttctcctccacctctgctcgcctcagagacaagtctgcacttgccactacaaagctgctcatctcggtgtcacggatggcgaggaggttagcgactgcagcaacggctcgtgccgccgcggctgcaggtggtgggagtgcgtccctcgcgagccccgcccgctcgagagcctcccgcaaccgcgccgcctcggcgcggtactcggccgcctgcgcacgcagccccgcagccgcgattccggcagcgcgggaccgcccctgcgaagcagaggccagcgcgcggaggtaggccaccccgcgcggtgtggggtcgggacccagcgacagctccgccgccgcacctccgccaccgcctcgccctcccacatccgcggcgagggaggccagccacgcatttacctccgcgacggcagcagaggaggaggcggacgagggtgccggggcggtggggtcgaggtgctcggcggcgtgatccattggggcgagtggatggatcagtggggagaattttacacggaggagaggaaatcagaggttggtgtttaaatttcgtggcaatttattccccagggaaaat

SEQ ID NO: 5476 - DNA, 1734 bp, Zea mays
  misc_feature (6)..(9): n is a, c, g, or t
  misc_feature (1695)..(1695): n is a, c, g, or t
  misc_feature (1700)..(1700): n is a, c, g, or t
  misc_feature (1728)..(1728): n is a, c, g, or t
  misc_feature (1731)..(1731): n is a, c, g, or t
cggccnnnnctagatcgcaggccgcttttttttttttttttttcagtccaaaagatgacggttcctgtgatattgatattaaatgcaaaaatttagtcagctccagaattacactgattatcatgttacaaggtcattgcaacttccaggtctctcaactgggaaactagatggttaccgacacaatctcagagtagtagatttcaatattggggtaaaccctaaaccaaacaaaggcagtctaatcgctaaagatgtatcacgccacagcagcactcatttgctcaaatctcactaatgtactctaaaagagattcaacctcctgcctcagggcagcaattttctgctgctgcaaagcaatcctgttctctacatcttgcccgcgcagcttcttctcaaagctgtcgacaacggtggaatgccttgtcatgagcttctcctgcatctctctctcctttacgatcaagtcctctacctttggcaatatctgataagactggggagatgactgtagagtcgccaacagtggcttcagatctttcgatagctccttaaactgcgtgtcagcagctttacgagctgccttgcaagactgaatgtctcctgtcctagacaaatcccgcaatgaggcctccagtttatcatgaactgctaagcattgctcaaagataccctggattttctgaacagttgcttgcacctcatcccattgcagcttggccaagtaggaaggagagctcttggatattgacatatcagtacgcatgtaaacaatacaggccacaaacaggaggaagaaaccagtaatcagcatcaacggctctctgagcaaggatatgttgttgaatctgtagtaaacctggaaatacaaattatgctctggaataacatcaggtttctccaagacaacaactggtcttccgacaatgtcaaggtgtgaatacttaacctcttgctgctgctgtgttggaaagggagctgaaacttcgatatcctttgacccttcaggtagaacaacctttacgataagcttttcaatgagaatttcctccaatggagaaccaaatgtgatattgagaaatctctttccatcagaatagaaaacaaagtcttcaagtggtaaaccataaccaacagtgaaggttgtttgccacccaccaaacaatggaaaccttggttctatttccagttgggtcttcatagaatcactccacaaatgtgatgtggaaatattaccaatctcatctcggtaataaatagagtgtgcccttggaggcagttttgcaataagatgtctaaaagatgaaacaccccttacgtaaggtctagattgataatcaatcctggaaaattcacccttgagtctggcaccaccatgagcaatgttgtagtgttccgtaatctgtacatttccccagtgagatatctcaatctcccttataacttcctttgcaactgcaaaaggattgttgttctcaaaatgcacaatcacaggtaagtaggagaacgggggaaggtcatgaaatggtccatatttcagttctgaatccacaagttttgcgtttggatgccttgtgtatgattcaacccttccaccaggcaatctgatagcaagtgtctgagccccggccggcctcggggtcccctagggagcactatcctgatagacaacaagttgtgcttcggcttgagtnatttnttctgggaatggttgaagagagtgtgtnacncgg

SEQ ID NO: 5477 - DNA, 1776 bp, Zea mays
ccggccgggatcattgggtacctcgacgccgggcgggactctaaatctctcccgtgcggcagtccacatggccgcaccgcctagacacgggtcgcgcgcaataacccaccgatcgagctgagcacgcacgacctggcgctcgctttaaactctcgctctcaatcgtcgtcgcctcgggctctcggcagacagctgcggcggcgtgcctggcagtgaagcggtagcaggtagagccagccagtctagcttagccaccacactagtgtgatggcgaccaccggcggcggcaaggcggcactggtgctggggcggcttctgcttctgctgtgcgtgctcggccatggagctgcgcagcggtacaacgccatctggagcttcggcgactccatctccgacaccggcaacctctgcgtggggggcgggtgcccttcctggctcaccacggggcagccgccctacggggagaccttcttcggccgccccaccggacgctgctccgacggccgcgtcatcgtcgacttcctggccgagcactttgggctgcccctgctgccggcttcgaaagccggcggcgacttgaagaagggggcgaacatggcgatcatcggcgccaccaccatggactttgacttcttcaagtccatcggcctcagcgacaagatctggaacaacgggccgctggacacccaaatccagtggttcaggcagctgctcccctccgtgtgcgggaaggattgcaagaactacctgtccaagtccctgttcgtggtgggcgagttcggcggcaacgactacaacgcggcgctcttctcggggcggtccatggcggaggtgagagggtacgtgcccatggtggtgagcaagctcgtccgcggcctggaggcgatcgtgaggagcggagccgtggacgtggtggtgcccggggtgctccccatcggctgcttccccatctacctcaccctctacggcacctccaacgccgccgactacgaccgcgacggctgcctccgcggctacaacggcctctcctcctaccacaacgcgctgctgcggcggagcctgtccggcctgcggaggacgtacccgcacgcccggatcatgtacgccgacttctacacccaggtcacccacatgatccgggcccctcacaacttcgggctcaagtacggcctcaaggtctgctgcggcgccggcgggcagggccagtacggctacaacaacaaggcgcggtgcggcatggccggggccagcgcctgcgccgacccgggcaactacctcatctgggacggcatccacctcaccgaggcggcctaccgctccattgccgacggctggctcaagggcccctactgcagccctcccatccagcactgatcgagctagctgggccgggggactgaatagctaattaagctagcagcatattattcatgagtgacatcatcgtgctttgtttgtttacggctaattgccatgtgcatcatcctagcgctctagcaggttcatcaatgatgggtttgctatttggtttgtcaattagttgttcaattggtgaggaaggggtagctggtgtttcggcggtgtggtgggaacagtgatgaataaacgtgtaatggactgtttacaattagctacgacgtacgtgaacaataagctcatatcacagcaaacaacaatatatgacgggaaggagcacaaaaaaaaaaaaaaaaaaaaaaaaaaaaaaaaaaaaaaaaaaaggggggcaaaaaaaaaaaaataaaaaaaaaaaaaaaa

SEQ ID NO: 5478 - DNA, 1527 bp, Zea mays
ggtacctcgccggccgggccgatgacgtcgctactcttccgggatggaccaataacattttatatctggacgccccttatcgccctcgttatttacatcgctgccaccctcctctccgccgtcgccgccgccgccggggatggggggagcgcaattccccggcgacaacgacgtcgcggaagtagacgcggcccgcgacggagaggtggaccgccgtgacgtgggcaagatgaagcacgggtgcgagcattaccggcggaggtgcaagatcgtggcaccgtgctgcaaccaggtgttcccctgccgccactgccacaacgaggctacggcttccggagatcggcatacaatatgtcgtcaggatgttgaaaaagtagtttgcctactctgtgaaacaaaacagccggtgtcacaagtgtgcataagctgtggagtcaatatgggagagtacttttgtgatatatgcaaattttatgatgatgatacagacaaagggcagtaccattgcatcgattgtggcatatgcagggttggtggcaaggaaaacttcttccactgtgtgaagtgtgggtcctgctattctgttatactccgtgataaccatcagtgtgtggagaactcaatgaggcagaattgcccaatctgttatgagtatctatttgactcattacaaggaacaagagttctgaactgtggacacacaatgcacttgacatgttttgaagaaatggtggcgcataacaaatacacttgtccaatatgctctaaaacagctcttgatttgacacatcattgggaaatgttggatcaagagatcgaagccacgatcatgcctcttgtgtatcgctacaagatttgggtgctttgcaacgattgcaacaaggtctcagaggtgaactttcacgtgattggccacaagtgcagccactgcagatcgtacaacacccgaacaacatcgcgccctgcagatttatccggaagcagctcaccttcaacagactcatccgacaacaacatatagagaagaaaccattgacagagccaatatgattgaagaaccggaggaggaaacattgtttcggggcgtgcgtgcttgccaaacttgaagactcccagccgtttattggccctcatcttgtctagattcagttcattccatgagtctttgctgttctggcaacttccagcttgcgcatcgctgggtcaacaacccacatggccggcgtagctgtccctttgaatcttgttcgcagccgtgattttatcactgtggatgaaacgtaatcacatacttactgtaatctactatggttgaagatgtgtgcccccctgactcatgccttgtgtgcttgtgctgaactgtttatgaattcccatgctgttccgtaacactatattgccatttgtgtttccttatctgtcaagtaccgccaagtgtgcggtgaaattgtaattatttgcaatgaatagaatcttatatctatacctaataataaagactcaacatttctaccaagttacccacac

SEQ ID NO: 5479 - DNA, 2339 bp, Zea mays
cttccccgttctgtcctcgcggtcgcgcaggcgtaccaaacagctagggccgggggccgcagccgcgcgctcccccggcgccggccggcgccgccgagatggtgcgcctcctctatctccggaccccgccgcggccgttgctcccgcagttcgctgtacatacacagcggccacaaagtctgctcagagtttccccccgcttccgccctcccatccgtcttcggtgccgcgcgctcgacgccagtagaccggttgcggtggagggggagcgggatgaggaggacggtctcgaggacgaggaggagtcctacttctcggtcacctcgtcggggctctcggaggtggactacctaggggaaagcaccaggggggatttgaacgtgaggagggagcgcctcgaggcgcttgggaacagcaagtcaactttgcatggtcctattgaggagatagcttggaaagaagcgggagaagctgaaacattgcttcatgacttgggaattgcagacccgttttcagtaagacactctcctcgtggaattttctgcaccaggacactaaatcttcgatctatcagtgtagttggctacgatatggattatacattaattcattacaatgtgatggcctgggaaggacgtgcatatgactatgggatggacaacctcaagagcatgggttttccagtagatgaccttaaatttgaccctgacctggtcataagaggtcttgttattgataaagagaagggaaacttggttaaagctgatcgatttgggtacattaagagggccatgcatggtacccaaatgctttccactcgtgctgtgagtgaaatatatggaagagaattggtggacctgcggaaagaaattcgatgggagttccttaatacccttttctctgtttcagaagctgtcatgttcatgcagatggttgacaagttagatcagggattggtgccagctgaacttgggccactggattacaaaggactgtacaatgctgtttccaaagcactttttcgagcacatgtagaaggccaacttaagagagaaataatggctgagcctgatcggtttgtagagcctgatccagaacttcctttagctcttcttgatcaaaaagaggctggaaaaaagttgcttctcattactaattcagatttccattatacaaacaaaatgatgaatcatgcattcaatcgctttcttcctaatgatgtgggatggagagatctgtttgaaatggttatagtctctgcaaggaagccagaattttttcagctttcacatccattgtatgaggttgtaacagatgatggactgatgcgtccctgttttaaagtaaattcaggtggcttatattctggtggtagtgctcagatggttgagaaatcactagacattcatggggatgagatattatatgttggggaccatatttacacagatgtaagccagtcaaaagttcatttacgatggaggacggcattaatctgcagagaactagaagatgagtttaatgcactggtcaaaagccatgatcagaaagaaaagcttgttacacttatacaacaaaaagaaattgtgggggatcttttcaaccagcttcgcctggctctgcagaggcgctctaattcacgtcctgcacagacgcttgctgcaacttgtatggatgaccaggagcttacggagagtatgcaaaagttgctcattgttatgcaaagattagatgaaaagatcgggccaatgctagaagcagatggagaacttttcaataaaagatggggttggttgtcacgtgctggcctatgggataagagtcatcttaccaggcaaattgaaaaatatgctgatatatacacatcaagggtttcaaattttctgcactatactccattcatgtatttccaatctcaagaacagacacttgcgcatgatgcccattcctattctggaggaaaggacatcaaagttcattgagcatccgttcgtcacaatctggagattaggcaggaaagagcgaacgtgatcattgtgattatggctgggatggctagacaacaacaattgtcgttttgaacaaattaattaatacaccttgtaagattgtatttatatataagtaaatctttagctatagcatgctgaatgattgttctgatagtcagtttgtttgtcgtggcctacctagagtttcatattgggaggcacagtacctgttttggtgtacctgctgctatttgcattgtatatgtgaaatgcgaagtgaagtatgacaaggtaacgataagtgacaaatcacgtcatttgatcctgcgcaaaacgatattaaaaaaa

SEQ ID NO: 5480 - DNA, 1351 bp, Zea mays
ccggccgggaccacggccacggagcgtcgcacgattcgcggccccgcccgcgccggccccggctccctccttctccgctgggtcactcgctcgtcgctcccaagtcccaccaagctgtcccccgaccactccgccgcccgctccaatggcggcgccggccagctcctcatgcttccacccacgcgcgaccgccagcccgccgtcttctctcagcgtcggcaccaaggtcttcgtcgggctcagggcgcagaccaagctcggttcgtcggagtcgtcatgcccgaatgtcagcgctgggttccacactgcggtcaaccggagaatctctctcaggttgtccaaaaagaaggcgaccagagcccgcatctcgatgatgcctattggtactccacgtgtgccttaccgaacacctggtgaaggaacctggcaatggcttgacatatggaacgctctgtaccgtgagcggattatcttcattggggacaatatagatgaagaattcagcaaccaagtgttggcaagcatgctctatcttgacagcattgataattccaaaaagataatgctatacattaatggaccaggaggagatcttactccgtgtatggcactatatgataccatgctaagtctaaaaagtcctattggcactcactgcttgggctttgcattcaacctggcaggattcatccttgcagccggtgaaaagggttcacgcactggtatgcctctatgccggatttcactccaatcacctgccggagcagctcgaggacaggctgacgatatagaaaacgaagcaaacgagcttatccgcatcaagaactatctctatggcaagctcgcggggcacacaggccattctgtcgagaagatccatgaggacctgtctagggtgaagcgcttcgacgccgaaggggctctcgagtacgggatcatcgaccgtattgtcaggccgtctaggatcaagaaagagggctccactgctcaaaggagggacatgcggaatctgggacttggctaataatagacgatcgaaatcctgttgtatcagaattttttgtgcaagggatgcgcttattatgggagagcgagcgatgcactgttccaggctctacgccggcgtaggtgttttgttgtgtcagctgtgcttttgctaactgtcagcactactattataatatatttgctgggattgttgatgagcacggcaaagaaaaagaccagagatgcgagggcactggcctctaggcgtctcgtctcttggacaactcttgtaccaatcaatcaaccaggtgcccatgctctggatggggactacagttatatgcagggctaaaaaaaaaaaaaa

SEQ ID NO: 5481 - DNA, 1796 bp, Zea mays
cccacgcgtccgtctctctctctctctctctaatttcccactacctgctcctgcttgttgcttgtgcggtgtgcgctgcgcgcggcaggggggtgaaggggatgaaggaggagatgatggtcggcctgtcggcgccggggccggtggggaggtggggcgccgcgccgccgcaggcgatgctggagaggatgaaggactacggccaggagggcgccttcgcgctctgggacgatctctcgcccgaggaccgggagctcctcgtccgggacatcgagagtctagacctctcaaggatcgatcggatcatccggcgctcccttggatcacaaggcatcccattgcctgctgtcgagcccgtgccggaatctagtgtctccaaggtggaggacaggtctgcagaggacaaagaaagatggtggaagaaggggttgaaagccatctcggaggggaagctggccgttgtccttttggccggtggtcagggtactcgactgggaagctcagatcctaagggatgtttcaatatcggacttccatcaggaaagtcacttttccagctccaagctgaaaggattctgtgcgttcaaaagctggctgctcaatctagcgaaagcccgagtaacactgtgccgatccactggtacataatgacaagcccctttacagatgctgccaccgccaaattctttgaaacccgtagatattttggcttagaccctgaccaagtgacatttttccaacaaggcacacttccatgcgtttctgccgatggtagatttattatggagacagcatatagggtagcaaaggctcctgatggcaacggtggagtttatgctgcactgaagtccaagaagttgatggaagatatggccgcgcggggtgtgaaatacgtagattgctacggagttgacaacgcgctggttcgagttgcagatcctacgttcttagggtacttcattgacatgggggcatcttctgccgccaaagtggttaggaaggcttatccgcaagagaacgttggggtgttcgttcaacgaggccgtgggggaccgctctcggtggttgagtacagcgaaatggattcggctatggctaccgaaatgaatcagtcgacagggcgactccgttactgttggagcaacatctgcctgcacatgttcactctggacttcttgaaccaagtggcaaacagccttgagaaggacagtgtataccatctagctgagaagaagatcccttccatccatgggttcacgacgggcctgaagcttgaacagtttatattcgacgccttcacatactccccgtccacggcacttttcgaggtcatgcgggaggaggaattcgcgccggtaaagaacgccagcggcgcaacgtatgacacccctgatagcgcgaagctcatgctgctccgcctccacagcagatgggtagtcgctgctggcggcttcttgacgcactctgtgcccttgtatatgacaggcgtcgaagtttctccgctctcctcctacgccggagagaacctggaagccatctgccgtgggcgaacgttccatgcgccgagcgagatctcgttttaggaggtagacctgttcatgggactggagtagcagttgtgtcatctgtaaaacgagcgtaaaggatgggcaggctgttgtgtactgcgtgttgtagatgtaacatctcggacggacacaaaattcatctcgagttttctctccaaaaaaaaaaaaaaaaaaaaaaaaaaaaaaaaaaaaaaaaaaaaaaaaaaaaaaggaaaaaaaaaaaaaaaa

SEQ ID NO: 5482 - DNA, 2662 bp, Zea mays
gtgatgcaattgaaggaacaactatgtttgccagtaaaaggtattggggaggagaagaaggggacacaatgttccgctggatacgcccaattccggtgggaaccgaggaggggggggggggagcaacaagttcatcatacacctgtgaaatgcaatgacattggcttctacatatctgtcttgtgcaagcctgttagaaatgatggagttgatggttctttagtgtcgactgaagcgattggtcctattataccagggccaccggcgtggcaatctcttgaactagctggctctatggttgaaggtggccgtttgacctttcatgctgtgtatacaggaggtttgcggggaagttgcatccaagaatgggtcagattacatgatgatgggcacaaggacaagttgactgctgatgaatgtctagaccttgatctagctgatatcgattgccggattgaacttatgtatacacctgtacgagaagacggagtgcacgggttaccaaggagtgttacttctgatacaatcttacctggggagcccaagggtgtcaatcttattctacctgagtgttttgaggacaatgaaatttctcccatcaaaacctatttcggtggcaaggaaggcactggcaaatatacatggtttcgaaataaagagaaacttgataacttggaatttgatctggttgctgaatcatcagaagttgttggagaaaccttaaaatataagccttcattgaatgatgttagttcctatctgattctttattgggttcctacacggcgtgatggaaaggttggtgatcctttgatggctatctctgatgatccggtcatggcagcttttccatctgtttcggatgttcacttagagcagaaaagttcagatgtatattgtggactaggcatctattatggtggatatgagggattaagcttgtatagatggtacagggaatctagtgatggaactaggcttcacatagatggtgctgattcagtcacatacgaagtgacagatgctgattacagctgccgtctactgtttggttatactcctgttcgttcagatgggataagtggagaagaaaaactctctgaaccatctgatgtaattttgccagaactactcaaaatcgagacactcaatttcaaggggaatcaggttgaaagagaaacactgactgctgctgaacaaattccgtacagtgagattcaacaacatatatggaaaaattataagaaagagatgaaatatcaatggtttatttccaatgaatcaggaggcgatcagtcttttgaaccattggcaacccagtgttctcgctcatacaaagtgcgctttgaggatattggtcgttgcctgaaatgcgaatgctttgtcactgatgtatttggacgatctagtgaattggtatccgctgtgactgctcctattttgccaggaaggcctaaaattgaaaagctggagattgaaggaagaggtttccacactgacctatatgccgttcagggtacctatagcggaggcaaagaaggcaagagtaaaatacaatggctcagatcgatggttggaagccctgatcttatctccatacctggcgaaactggaagaacgtatgaagctaatgttgatgatgtagggtataggcttgttgcaatttatacacctgtaagagaggatggagttgagggacaacctgtttctgtttcaacagaacagattgcagttgagcctgaactttacagggaagtgaaacagaagctcgatgatggttcagtcaaatttgaggttctgtgtgacaaggaccgaacacccaaaaaggcacaagtaatgggccatttggagcggagggttttggaagtcaaccgaaagaggataaaagtagtaaagcctggatctaagacatcattcccgagtactgaagtacgaggaacctacgctccaccgttccatgtcgagctgtatcgcaatgaccagcaccgcttcaagattgttgtcgacggtgatactgaagttgacttaatggtgcaaacacgacacatgcgagaccgcatcatcctcacgatcagaggcctcgcccagaagttcaacagcacctccctcaacacacttctcaggatcgaggcatgatttgatgggtaggatgcccacatgatagacctgacaagtgtaaaaaccaactattacgggaagctgttccccttgttccgattggttagagtgcgtggttttagtaggattcgtgacatgccagccttttgtgtgtatgggtgtgggacgggccgagcgtgttggattacagtttttttccctgacacatctctcaaatcagagcagcatcagctggttgctctgactcgtgccgtcgtgcgtcatgaaatgtacatagggtcgttagagcgagaaagagagtggtgtttcttggtgctgtatttattatgcactggttgggttgggttttttcgactgccattctcatactaagtattggttctttcttttttcggtcgttgggtttgcatatacttgtaccgacaacacagcttcggggtgattgggcgagtcctgttccgttcagaatgcctggtccacatttgtgtatgctgttttacggtcgcaaatgtaaattcacctgcccataaaacgagaatcaaaa

SEQ ID NO: 5483 - DNA, 2516 bp, Zea mays
ggccggggcccccggaccctattaaaccattgggtacctcgaggccggccgggccgccgtcgtcgtctagctcccatccgacctcctgcattccccactagtcccaactcccaaccaccgccagccgtccgctctccgcaagcgcgaccttccggccagatccgccccgtcgcgccgacgagcggtccttctgcctagtttctccgcccagcgagcggcgggttcctcggagattcccgctggccgcggggatccatttgtgactgctcgcgttgcgcctggatctggtttgggacggaggagtgaaacgcgacggtgatcgtgcgaggtgggacgccatcagtgctctgtctggggttcggtctgttcttcggctgcagatctggaagggtttcgtgggatccgtcgctacgatctgtcccagtcagagcacctgcatcatctcgggtcgggccatggagactctgctcatctcggaggagcgcaaccaccagctccaccacttctcgggtcgccggaagaaggcgttagcagcgtcgcctcagtccacgcgcagctaccatgcgggcaactgccgggcgttccactccggcatcaccgtcggcatcctgccgtccccgcccgcgcagagggttgcactgacccgctcctctcctgagcccaagacaccgaaacatcagcttcaccatgggaaaaagcgcagccgagcaatctctataaacctttcgacgtcccctccctctcgccctgagctctgggctggcccggggttctgcaattcgccgcctcccagctccctcccgatccccaagttctcactccaccagaagcgcagtgtctcacttgaatttccacctgctgaccggtcagacgacgaagaggtgcccgtgcatgccaagtcggcaccttcatcgccgactgcaggctcaggtgttaccttcttcagtggtactgatgctaccattgccaccgagaatctgaggaggatccttaacctcaaaattgaggataactgaatggcggttgggtagttctgtgtacatagtttaactacaactgacctttgtagtatgtatagggtaaccggggataaccactgtgtacctggcggtggttccttctgcagcagtactgtaggcggttagcaagcacagcgaggagtttaggaagtttggaaatgcagtgagaaggatgttgtggtaatggagatttggtggatttgcatatcactgcagtttcagagtcacctttgttccttgtaccttgtagttgcctattagtagtccaatactccatttagatgttatagtatttgcatcttccctgcccatcattaaccagtagccacagccttcatatcataatccttgtcatgtagttcatctcaggcagggcattgtaggctagctagtactgttcaagttctgtcatatatgtagtcttctgtaggattgctgcatcccttgaaacttgcattctgtatcacattgcatcctgctgactcacctcccttcataacatctccctgtgttatgcaaagcgcacaaggatctcccctctggcacttctgttttttggaatgaagatgctcagaggagttgttatgaagtcccgatccaatgttctttgtcctccatgtctgtactgactttagctatgcatctcctttgtcaccccagtcccattgcatgtgccatccaatccgtttcgaaccattcatctcaaaattgcatttagtggtggttttcccttcgtcttattatcttttgtgcctcatgatcctggagcatgcccaggattctagtctcctccatgtattctcataaaggacttcacgtatcagagatctgcgaatgctcaaccctgaatatggtttgcttgtccgatgccacttcgcctcatccatacctggagttcagaattggcgaagcacctatcacttagctatctgtttcatagtcagtattgtgtcagactgttgtttttgtgcaatatttgattggctactagtctgtttgtgttactgttcaagtttatggtactgatcatatatggcggccggagtgttccacgccgatgctgtggcattctgttgctttcaagtaaaactagtcaatgttatgtaccttcatgttattttttggtcctgtttctgtgacatgtttgaagttccatgttatcgcactgtatttgctcccaagatcttttttgtttggtccgcttttctagtggtcctaatcatcgtgtgacaaatggttgttactatacttaagggtctcctttttaaggataaatatcaacgttccgaattgcgatgcttggtggcccctgcatactttgtgcggggaagatggctatggttggtacttgttgagatgattgtggagcctgtttgagaacctgtagttgattagtgttgtggagataaaaataccaatatgcttgtcagtaactcaacatctgttgctttgttcttttcactgaaaggggctgcagttgattcctcctgtgccgac

SEQ ID NO: 5484 - DNA, 1816 bp, Zea mays
  misc_feature (1806)..(1806): n is a, c, g, or t
ttttttgttttttttttttttttttgtggactagtggcagcagtaatattatatcttaactgattgagttaagcacaagctgaaacatcacatccagatactacctactaaaaggacagaggggaaacagggctgtgcaaatgccatcaatcaggaaggtgatggccagagaaccattatactgaaagcttctgtggctcatggctagcagaactgaattggcatgcataagcagtggcgtacagacggttagattcggccatgtcactctcctcgccttccactcctaaaaactgagacgtctttccactcgaacagctcctttcagacagcaacttctcttcggataaagccttctcgagcctctcctcaaatggcgttgcatgccaactcaccttttggtcttctttgtacttatttgttgaattgggaatgccatttccatcccgcaatttagaggtaaaatttgctggcagtggcaccttatctttccaatgtgctgcaaccattccaataataggcctatcctcatctgaactcttacccgaatgagacctgtctcctgccatggcctcatctctgaatgtcttcttaggatttgggggcttcaaccattgggctaagcttgggagctccagttctgaattatcgctcttcggtaacttctttctggtggcatggatagttgcctcagttttcggggacttctccacagatgttgtgttcatgctctctcttatcttgtaagaagatggtacagaaccctcagagctctggaaaagggagcattcatcagatattgaaatttccatggagaccacatggtgattctttgcgcactttggttcctctgttttttcagggtgaaaggattcttcttttgagaccccacattcttcaagatccagagcttggtgttgctcttcatcctgcacaagtgcctccatgttgttctcattcatcgaatctttcacattatttgcaagggaagtagcggaagtctgcaactcatcgtttgtttttgaagaactcgttgcatctggaacagtgaaactctgatgagaccttgaaggagtttcacatttctcaaccttcggcgcttccatgaaatgtagatcatcagacacaacaggaagacatcctgaatgtgtttccttctgatgaactgaatcagcatatttgatgagcgctccttgaatgttatttgtagtttgcagcaacgcaccacagcttctttggataatggcctgatgcacaagctcctgatccatctccttcctctcgccactctcgtccgcccacgagctcgccacttgcgccgtccttgatccctcatcttctcgctggaacacggcggagagcgcgttcctcgacggcggcctggccctcctgcccgcgccatcctggacctggtggctggtcgtcgtcgtcgtcgcggggggctgggacggatgcgcgagctggccgccggtgcccttcacctcgccatcgccgccggacgcgcggaagcaggcgaagaggcaccccatcatcccccctcctcctctgccgccgccgccgcgcggcgtggatttcgcccgctttgaggaagagctgggccgtacctcgtggcagcaggagagaggactgaggaggaggttttaggggaagagtaggtgggaggggtttgaaatttaaaatggggaggagagacgaggcggggccggaggcggaggcggaggccgagggaaggagagaagagaaagtcacggcggagtcagtggagcgctccgggaagtgggagtgtgggtgggagactggggactnctgggaggcc

SEQ ID NO: 5485 - DNA, 787 bp, Zea mays
actcctaccgcgcgcctggggtacctcgagccggccgggggaagcccaccatttggtttggttgtttgtttggtggacgccttgcttttcacttcaccggaaaccaaaatggcagccagcaggatccctccttgccatcttcacccttcttcttcttcctcctcctcctcctccatggccacgatctgcccaaggccaggcacaaggcagtcgtcggccttcaggttcagggcctctgctcatgggagcggttcctcaccacacctctcctccttcactgctgtgacaggcaagaaggttaaggtgttcgaggaccagctgagagggatcgtgtgctacagagacgaggacggggagatggtctgcgaggggtacgacgaaggccccaggctcggaatgcggctgccggagaaggcctccttcccatggcctgtgggggttcggatcacggacttcatccagctggcgacgctccaggtcttcgacgacgacgtcgatgttcttcagctcacgggtgaccagaactaaagcatgtaagcatagtggtgtcgtagtacagtacagtgatgggtatatgcaagaataatgcgtggtgttgctcttatttgctcaggcttacttgtttgtacataatcacttactgcaaggatgagattgttgtttaaagcacaacctttatgtatgcatatatatactatatgaattgagaaaattgagatctgaatacaaggataaaaacgcttgtactcaaaaaaaaaaaaagaaaaaaaaaaaaaaaagcgccccc

SEQ ID NO: 5486 - DNA, 1719 bp, Zea mays
cccactcgttcgggtcaggcgcctgaatcgtccacaatgagccacgagatcgactacacgattaaggcccagggtgccgaaacaaactgttgagagtgagaaggccgaggccgacgtgccacgctcggatctcacaactagtcacaagctgcttctccatattccacaatccacacatccggaccgagcgcgaccccacctcccagatctcatctgcgacgacctcctccctcccgatcccgctccgtctccccccaccgccaccgctgccgctgccgcctcccccaccgaggtcttgtcttcggcgatccagccggagcccgcggcggcgacgatgtacgggtgggagatgctgtcgttcaacatacacgatgggttcctggaggccatcgtgcggggcaaccgctcgggcctcctcaccgccgccgactacaacaacctctgccagtgcgagaccctcgacgacatcaagatgcacctcaccgccaccgagtacgggccctacctccagaacgaaccttcacccttgcacacaacgacaattgtggagaagtgcactcttaaactagtcgatgagtacaagcacatgctgtgccaggccactgaaccactatctacgtttttgcagtatataacttatggccacatgattgacaatgttgtccttattgtaactgggacactgcatgagagagatgttaacgaacttttggagaaatgccacccattgggcatgtttgacagcattgcatcacttgctgttgctcaaaacatgcgtgagctttatagattggttctagtcgatacaccactggccccttacttctcagagtgcattacatctgaggatttggatgacatgaatattgagattatgaggaacactctctacaaagcatatcttgaggacttctacaaattttgccagaaactaggtggtgcaacagctgagatcatgtgtgatctcctttcatttgaagctgacagaagagctgttaacattacaataaatagtattggtactgagttgacaagagatgaccgcaggaagctgtactccaactttggtttattgtatccatatggccacgaagaattggccgtttgtgaagatgttgaccaggttcgtggtgcaatggagaagtacccaccataccagtctatattttccaggatttcatatggagaaagtcagatgttggataaggcattttatgaggaggaagtcaagaggctatgcttgtcctttgagcagcagttccactacgctgttttcttcgcttacatcaggctccgcgagcaggagatcaggaacctgatgtggatctctgaatgtgtcgctcagaaccagaagtcccgggtccatgacagtgtcgtcttcatattctgagaacccccgccactatatatgtatgtacaaaatgcctgctttgatgatggcacaatcgctcgacaattataaatctgggacttattattattcccattccctctgttagacgccggcgtaaaaaatgccagacctggagttgatgtattatttgttttgtagtcaaataaaggtgtgattatctggcacacaaaataaaatcttgtgtattttggaacagaccttcatcgtcaatgcacagtatgctgtcaatgcacaatatgtgtgtgcaaaagcaaaatagatatatcatgcacacatgtagggggagatatctcttaaaaaaaaaa

SEQ ID NO: 5487 - DNA, 1682 bp, Zea mays
aagtctgtccaccttccgcgtagactcggatcccacctagtcaatggagtgagcaacgagggttgggttcggcagcagcgagggaaaagccaaagccccccagggcagcaggaagcaatagaagcgagcgaggcagcggcgtggggcgaggagtggaggacaccgatccccgccggagagcgcgtccatcccaaatggcgactgcagcttcgcccgccgctgcctttccccacatcctctccctctcctcctaatcccctcccaatccccccctctctctctcttcctcgccagctggttcgttccgcacccgccgccgcattgggtgccgaggagggacgcaatggagcagtacgagaaggtggagaagatcggggagggcacgtacggggtggtgtacaaggcgctggacaaggccaccaacgagacgatcgcgctcaagaagatccgcctcgagcaggaggacgagggcgtcccgtccaccgccatccgcgagatctctctcctcaaggagatgaaccacggcaacatcgtcaggttacatgatgttgtccacagcgagaagcggatatacctcgtcttcgagtacctggatctggacctcaagaagttcatggactcttgcccggagtttgctaagaatcccactttgattaagtcatacctctaccagatactccgtggcgttgcgtactgccattctcatagagttcttcaccgagatttgaaacctcagaacttgttgatagatcggcgtaataatgcactgaagcttgcagactttggtttagccagggcatttggaattcctgtccgtacatttactcatgaggtagtgacattatggtacagagctccagaaatccttcttggagcgagacagtattccacaccagttgacgtatggtctgtgggctgtatctttgcggaaatggtgaaccaaaagccactattccctggtgattctgagatcgacgaactgttcaagatattcagggtgctaggtacaccgaatgaacaaagttggcctggagtcagttgtttgcctgacttcaagactgctttccccaggtggcaagctcaggacctggcaacaatagtcccaaatctagaacctgctggcttggaccttctctctaaaatgcttcggtatgagccaagcaaaagaatcacagctaggcaagcacttgagcacgagtacttcaaggaccttgagatggtacagtgacctgctaaatgtgcttcgcgttgctttggcatttgtaattgtctgagctgagtcgctcattcctttttatgggcgtctgtactctctcattctctctgcatttttgtcgttcagctggatattttgaatctggtgtgttttgagatgtattaaggaatatcaaatagattaccgccttggtctctatttactgaaagtaaatatcctccatgtttatttcccccgaagcagaaaaaaaaaaaaaaaaaaaaaaaaaaaaaaaaaaaaaaaaaaaaaaaaaaaaaaaaaaaaaaaaaaaaaaaaaaaaaaaaaaaaaaaaaaaaaataaaaaaaaaaaaaaaaggggggcccgctttaagggaccaaattttacgtccccgggaatgcaaggtaatagttttttttttgggcccccaaatttaatttaatgggcggggttttaaaaacgggggga

SEQ ID NO: 5488 - DNA, 2403 bp, Zea mays
atatatataaaaaaaaagatataaaatatattaaaaatataaaaaaagaaataataaaaaaaataaaaaaataaaaaataaaaaaaaaattataataataaataaaaaaaaaaaaaaaaaaaaataaaaaacccataaaaaaaataagaaaaaatataaaatataaaatatattatataatttaaaatatattaaattaattataataattaatattaaaataattttataattatttgagctcacttgttttttttttttttttttaatcgtcattgatgaaatttattatttcaaaacgctagagtacgaaaaagttctgcttacatattatgacttataaaggctgacaattcgggatgtttaagaacatccatcccttgctgaagtttacaggatttgatgcaataatgttacagtagcacagcactagtagctctgtctgtattgtttattatgtaataatgttacaatggaaatacatgtttgatggattcaaaatctctttggccactcaagagtgtaaaccatggatgtagctagaccagtgatcgatctcatcagttctttggtgcattagcacatctgcttggtaattggggttgagtaagttggcagatcaaccattgttcagtgctgctgctagaattgggtttttctccaaggcaagtagtctccgccgaggtcactgctagaatctagtccgctgcacctgagagctgctgcacatgcaacgttatggcttccggacagggggactgggctcgcagaagttcgaggcggttaaatggatgtacaaattgaagaacatagtcttcattctctttgacagtcccatacaaccaacataagacttcatcggcaaaggcaaggcaaacgccaccctgccagtagttctttgccttcaccttttgtgtaatatctttggttcttagtctttccgtccgtacaagtatgccagcatcattcctgaatcccacaacaacataaggaacaccggcaagaaacgattgaatccaaaatctaagtagcttttctttttcatatgcttccactgtatgatattccagctctctgcttgttttcagctccacatagaacctcctgccatcatcagttgcatcacagcagtccatctcagcacccatgacaatccgatgggcacccaattttgtctttattacagaacaaaactctacatttgcatcgataccccttccatcgtcgctgaatgagttctcagtggcaaggttttcaaaagaatagccccaataacatctcttacgctcaacttcactttttggtctttcagggagcttatgaacatcaagatatacaacaccccttcttttatgaacgcccatcttccatggttctcttaggtaagcagtggccaatatcttattaagattgttgcggtatgtcacaaaatgtatagtattctgaagaagtatgttggaatttcgtatgcatgcgagtagatcgccaaatccttcagaacccaaatctctcttctctatatatgactcgaatcctttattgagatctgcaccgcggtattcacagatttcacgtttgaagagcctcaagctgcgatcatcaaaatacacctttccaccctcaacacggcttaagcatgcaatctcacaaggctcctgaaaagtaacagcttttctagacaatgtttcttcgctcttattaagcttcatatctgaaactaaaccttcaacatgacgcccattcccgaatctcccgtaaccaaagttatgtcgccctggatggcctcctggccttggaagaagtggtgggcctctaccacctcgtcctccaaagcctcctcgagaatgattattagtgttccgaattggaggaagcactgggactaggtagtggctgcgcgccggagttctgacgtactcttcgttatctgagccgaacaaatctctctcctcctctacctcctggttctcatattccctcctctcatcgtccagatagccggcggcgccggcgctccttgtggctatgaggttggacgaatcgtattcctccccgtcccccacatcggcgccatcctcgccctcaccggcagcgccgccgctgctgctgaggcttgagccgccacttgaggatgaggaggacgcggcggcagaggacgacgaggacgatgatggggaggaggagcccgacgagtccccgccgccgtcggcctcggcctcggcctcggcgccgccgtcgtggacgtcgtagtcctcgccgaagacgttgacgtcctgttccgagaagtccatggcgggcgcggcgggggcggtgagccggcgaggcctggtcgggaaacgaaacggagaagagggtttcggtcgggtccgacacgacacggaacaaaagaaacctcccggccgg

SEQ ID NO: 5489 - DNA, 4930 bp, Zea mays
  misc_feature (3956)..(3956): n is a, c, g, or t
agctcggaattcggctcgaggaaatttcgcgaatctgcaaaagtagatgccaggcactgggagcagataaatgagcggcggtataatcttgatttggttcgtgatgtgatgtctacagagctaagagcaattcgtcaagacaaatacggttggatattgcacggagaaagtgagtggcaaagccagctccaagaacttgtccatgagagaggtatttttcctatgcggcaaccatccacagaacctgagtggcagctgtgtggtgttgaaggaccatatagaatgaggaagaaacttgagcactccaaatttaagatagatactattcagaatgttctaaccagcaaccttggatcaaatggtggtaagattatcaataaagaggatggagaattgttgttgacatctgggtcagacacaatgtcaggcttgaatcttttgacctatgacactgagcagagggatcttgatgctgtcgagttttcgtcattcaaagatgatgatgacatattcaaaggaggaagcacaatttcaggtccaattggctggactgatgataaaagcagcgttaatgagcagagccttcattctgcgacggaatttggagcaaaatcaagttccctttcttttcacatgactgagagtcaccagggtaaatctgaacttagttcaccaaggagggcaccttcagtcaaaggtactgatgcaagaacctcagaggataaatcagaaaaggggttgcttgacaatggtgagtatcttatcaggccttatctggagccctatgagaaaataaggcataaatacaactgtgaacgggttgctggtcttgataaacacgatggaatatttttaattggagaactttgcttatacattattgagaacttctacattgatgattccaattgcatttgcgaaaagggcagtgaagatgagctctctgtcattgatcaagctttaggtgtgaacaaggatataatgggaggcagtgaatctcagttaaagtcacctaccacttggggtgggacagcaaaggtcttgcttggtggcagatcatgggcatataatggaggtgcttggggtaaggagaagctttgcaacagtagcaacctgcctcatccatggcatatgtggaagcttgatagtgtccatgagttgttgaaacgtgattaccagctccgccctgttgcaattgaaattttcagcatggatggttgcaatgagcttctagttttccacaaaaaggagagagaggaagttttcaaaaatttgattgccatgaatctcccacggaatagcatgttggacacaaccatatcagcatcctctaaacaggagagtggtgaggggagccgtctttttaaagtcatggcaaaatcattttctaaaagatggcaaagtggagaaattacgaacttccaatatctcatgcatctaaatacacttgctggtcgagggtatagtgatctcacacagtacccagtatttccatgggttctcgcagattatgagagcgatgttttagatctgaggaatccacagacatttcgcaggcttgataaacccatgggatgccaaacggaggaaggtgaagaggaattctgcaagagatatgatagctgggatgaccctgatgtaccaaagttccattatggctctcattattcaagtgctggaattgtccttttctatctcttaaggttgcctccttttagcacagaaaatcagaaattgcagggtggacaatttgaccatgcagaccggttattcaacagtgtgaaggatacatgggtaagtgctgcaggcaaaagtaacacatcagatgtgaaagaactaattcctgagttctattatttgcctgaatttttggagaaccgttttaatctggatctgggcgagaaacaatcaggagagaaggttggtgatgttgttttaccaccttgggctaaaggcagcgccagagagttcatcaggaagcatcgggaagcactggaatcggattatgtatctgagaatctgcatcattggattgatcttatttttggatataagcagagaggaaaggcagctgaagatgccgtcaatgtcttctatcactacacatatgaaggcaatgttgacatagacgcagtatcagatcctaccatgaaggcttcaatactagcacaaatcaaccattttggtcagacccccaaacagttattccagaaaccacatccacagaggcggactgacaggaaagtccctcctcatcctctacggtactgtgcctatctaacacagcaggagattcgcaagacagcatcttcggtgtcccagattgtctcctacaatgataagatcctaattgctgcagttaactgcttgctcaagccgctaacttataatgaatacatttcctggggattccctgaccgaagcttgagaatattaacatatgatcaggatagacttttgtctactcatgaaaaccttcatggtggtagtcaaattcagtgcactggagtgagccatgatggcaacattctcatcactggtggtgatgatggagttgttgcagtgtggagatttgtgaaggatggcatccgccgtctcctgagaatggagaaggctttgtgtgctcacacgggcaagataacttgcgtctctgtcagccaaccttactcattaattgtctcaggctctgatgactgttctgttatcttatgggacctgacaagcctagtctttgtgaagcagctaccaaggttcccggcatcagtatccgcgctacatgtgaacagcctcactggtgagattctgactggtgctggtgttctttttgctgtttggagcatcaatggggactgccttgctgtggtgaacacctcccagcttccttctgacctcatcttgtctgtgacaagcgcgacacactcagactggcaggacacaaactggtacgtgacaggccatcaaagcggcgcggttaaggtatggaagatgttgcactgctcgtctgatgaagcagtaaatagcaagagcaaatcacctgcggtatcgtctggtgggcttagcctgaacggccaagcaccagagtataggctacttctgcagaaggtgctcaagtcacacaaacaccctgtcactgccctttgtataccaccggacttgaagcagcttctgagtggcgatggcagcggtcacttgctctcatggtcattgaaagacgacagtttcaagggttcatagcacagagaaatatagggattcagctgcacatatagagaaacactggttaaattgtaccactgatttcttcctcgtccagaactgagcattggcgtgcattgacaaaagatctcggatcagcaagcttctacatggtatatgaaatgttcccttgatgtcccatgcctgggccatacagcagtccgggcaggagagagaatacaacagacacaattggaaggatgaagtggacgtggatgcgccgctgcgctgacatcataatcttatactgtgaattatgagatggttgtaccttctcttgtttttttgaggagaaaaggattcatgtgggctgtaggtgccattgtttgtaaagtctatacagggtaattttggtggtgccggttgaggtggctgatggtgtagtgtctcgatgttttgttcggggttgcgggagcaaggaaagaggtattaggttcaaaatctccccccacctctggaggctagtttgggagccacaaaaccgaaagtgattggatggactaaaagcttctacatattcaaaattgaataagaacgagattttaatcacttcaatcctcttcgattttgtggcttccaaactagccccagaagtgttgattctttgactgggtgtaatttgagcacccttgtgttcagtaagtctatttgcgtatacatgcaagagttttgctgaacaaagcgacgagccccttccatgnttcgattggaagtgaagtgtagtgtcgcagatattttctccgccctaaattataagtagtttgatttttataagtagttttgattttttttttctagggaagccaaaataacatagttgaaacagagggagaaattcagaaattttgaaggtttaatgtgtagttcagccaccgttacggttcacattcgtgatgcaacagcacggcttacattcgtgttgcaacagcccggcagcggctccgtgcagctaattttggagagctaaatggtttaactttgagtataatttttcatttttataaccacactgttctatatagagttaatttaaacaataataaattagaaatgaagcggctccatttcatcatactctagaactaaatcctacctaagtgtagccgtgcaatcacagatcaacaagcggataagatgcattaccaatcgtttttttgttcggttatacaggaatagggaattgaaatttcttcctaatcaaaattaataaaaaggatttaatttcctttgatccttgcgcaatcgaaaagaccttaagatgttcatctagaccgacgccttgaatccgatcgacgtatcctctcgttgttgtcactaggatagacggcactttctctgtatacaaatgtttgtcattgttatttttaaggagttaattatttttaactttaaccatatttatataaaaagatcaatatttatagtacataatttgtattattaggtagatctttaaatctattatatttcataactctaattaaatttgagaaaatttgaccataacgacaaatatttatggacaaagggagtaacatgaaagtttatctagaaattcgcccatggctccatgataattttgtagccctacatgtgaggcacaaaatcgtagatgtctcgactctgttcttcgctcttcgcaccaaagagaaggccctaagagcagtcccaaccc

SEQ ID NO: 5490 - DNA, 1866 bp, Zea mays
gctacgagtctacgaccagttcggcagcacggcgagcatcccgtccgaccatccgctcgctcctcagagctagcctccaaactcgcaactatataacattgggcccctcgaggccggccgaccttttgcccccctgcttcctccgcctgcaccctctcacgagcgcccgctcgcccagatctagggttccatccgcgggcaagatgagcagcccccatggcggcctcgacgaccagatcgagcggctcatgcagtgcaagccgctcgctgagcccgaggtaagggctctgtgtgagaaggcaaaggagattctgatggaggaaagcaatgttcagcctgtaaagagtcctgttactatatgcggtgatattcatggacaatttcatgatcttgctgaactcttccgaattggtggaaagtgtccagatacgaactacctgtttatgggagattatgttgaccgtggttactactctgtcgaaactgtcacacttttggtgtctttaaaagttcgatatcctcagaggatcaccattctcagaggaaaccatgaaagccgacagattactcaagtttatgggttctatgacgaatgcttaaggaagtatggaaacgcaaatgtctggaaaacatttacagatctatttgattacttccccttgactgcattggtcgagtcagaaatattttgtttgcatggtggattatcgccatccattgagaccctcgacaacatccgcaacttcgaccgtgtccaagaagttcctcatgaaggtccaatgtgtgatcttctgtggtctgatccagatgatcgatgtggttggggtatttctccacgtggtgctgggtatacctttggacaggatatatcagagcagttcaaccataccaatagcctaaggcttattgctagagctcaccaattggttatggagggtttcaattgggctcatgagcaaaaggtcgtgactatatttagtgcacctaattattgctaccgctgtgggaacatggcatcaatcctagaagtggatgattgcagggaacatactttcatccagttcgagccagccccgagaaggggagagccagatgtaacccgtaggacacctgactattttctgtgatgcaaaagtgacgtggatctgcagcaaaggtttgatagataggcgcagtttcctggttgcagagatatataaatatatatctactatatatattggctggagttcctccgcgtgctattcttatattatttctcgcccatggcgctcttggctgtcgccggctgctttgctgcatcgtggttcaagtgtataccctactacagctggaaggactggatcgtgctcttacggtcttacctgtctctaactggttgattggcttagggtgggctgcggtggtgtgtgtgtgggttcaagcatcaggcagccatctgtattatgggaggaagtgttcccgttgtattcattttgttcccctttcttcctcatctgattttcttctctttttttatttgttccttctctgtgattcttgtagagttcagaacttgtatggttctatgttgggccattagttttttttaactctctttctctgactgccccgatttgccgtatagaattacatttctaagcgcaactagccaacctgtagcattttctgtcaccagcatttgaagttttgaactgagccctggtcgtgtccctgaggtttgatgtgctcttggtgtactactcgtatttgctaattagaaaaggaccttttgtgggtttgctagcgtttggcactaacgcccacgctagaatgttttgacgttgtccatgtgacctggatggaagctgtgaaccgtaattggct

SEQ ID NO: 5491 - DNA, 1653 bp, Zea mays
aaattcacgtaatctgttgcaatgatatatttttttagttttattgaaaaatagggaaaggcagaaaaaacgagaaaagattcgagtttctaaacccgtcacggcgtcttgttcagaggaattccattcctacgaagaaagtatttccttcctcctgaatcctgatctctcacggagttcccctgtatggcgacgcctcgctcaccgagccccagcgccgccgcgcgtctcgattctgcgccgctgctgggcggcgcctccggcggcgggtcccgtcgccgagatggagcgcttcgccggccctccctccgcggcgcggcgcggctgctgcgtcgcggcgggcggcgggccatgcgggagccctcggtgctggtgcgggaggccgccgcagagcacctcgaggagcggcaggctgactgggcctactcccgccccgtcgtggcgctcgacctgctgtggaacctcgctttcatcaccgtcgctgcggtcgtgctcgtgctcagccgcgacgaggactcgcccatgccgctccggacctgggtcgccggctacgcccttcagtgcgtcgtacacatgatttgcgtcgcaatcgagtacaggatgcgccacggccagcgcggcggcgccggcgctggcgcagcgcccgcagacgtggaaaggggcagcgacgcatcgtcctcatccagtgacgaggatgacagggagctcgatctccatggtcgccgcactgattacgccagtattgcgaagccccgggtcccccctcgcgcccggttctccttcatatggtggataattggattttattggatatctgctgggggtgaggaggttattcgggatgcacctcaactttactggctttgcatagtctttctggcatttgatgtgttttttgttgtattctgcgttgctctggcttgtattattggtattgctgtctgttgttgccttccttgtatcatagcaattctctatgcagtatctgatcaggaaggagcatctgaagatgacattcgtcaaatcccaagatacaaatttcggcggacggatgagcctgagaagcaagatgttgaccccatgggtccttttggtggaataatgatagagtgtggcaccaatcaacctattgagaaagtgcttgcagctgaagatgcagagtgttgtatttgcctatcggcttacgatgacagtgcagagttgcgcgaactcccctgtgggcaccatttccactgcacctgtatcgataagtggcttcacatcaatgcaacatgccccctgtgcaagtacaacattcggaaaagcagcagtagcagtggaagtgaagaagtatgaatgcagtccgcttgacaatgccaatctgtttcaacttctgttccgttgctaatgtaactccaggccttgatgagtgtaaatttttgtatccaaaaaaatgtgctgatagagtcagttatttatcaaagttactcaaagtgctgtcaatatgtcatataagttaataaacagttgggtatgcttctgtatttactgtcaggaatatattattagttgcattgtaacttgtgtccttttgaatgatccgggtgttttcctgcttggttaatgatgacaaaatgtcttgcatggtttcttatgacaaaaaaaaaaaaaaaa

SEQ ID NO: 5492 - DNA, 2085 bp, Zea mays
ccggcccggagttccccaaagttcccaacgccgccgcgacggcgctgctagctagtctttggtgttgcaggtgttcgattcctgattccaaattccagactccaaactcggttcttcaatcgacagattccgatttacatcccaaagctcttcggattgaaatccagccgcgacccaagagataagagtatttgggattagtagatagggagggtagataggatagtagaatagaagaggagcactttcgctgatgattacggcggaggagaagagccccgaaagggaggaggaggaggaggaggcgaacccgcgcgcggaggcttttctggagatcatctgccgcgtcccggcgggggaggtggaggcggcgctgtccgcttgcggcatcggccccacggccgaggtcgaggaactggtgctcaagtcccgcgaatgctacaagcgccctaagtccgccgtccgcttcttccgctgggcggggcagtccgtgtcgcacaccgcctacgcatggaacctccttgtcgacatcctcggcaaggccgccatgttcgagcccatgtgggacgccatccgctccatgaagcaggagggcggcggcgggctcgtctccgtcgccaccttcgcctccgtcttcgcctcctactgcgccgctggcaacatcaaagatgcaatcgcggccttagacgtcatggaccgctacggcctcaagcacgacgccgtcgcgctcaactcgctgctctcggcgatttgccgcgtcgagggtcgcgcgcaggatgcgcaggacgtcttcgagcgtaccaaggcaaccatcccacccgacggcgacacgttcgcgatactgctcgaggcatggggagaaggaggggaacgcggtgcgcgccaagagcgtctttggcgagatggtcgtccgcatcggctgggacgcagccaacgtatccgcgtacgactccttcctctccactctcgttcggggcggcctgttggacgaggccttcaaatttctgcaggtgatgcggagcaagggctgcttgccggggatcaattttttttctacagctgtggatctggtcgtccgcaagggtgactacctcaacgccgtagccatctggcacatgatggtctctgaagccggcctcgttcccaatttctcaatgtacagcgccatgattggcctccactgcaatgctggtagcatagacgatgctcttgggttgcttgatgaaatgcccctcaacggcgtctttgcaaattctgtcacatacaacaccatactggaaggattcatcaagcatcgcaaggctcgtgaggctgaaagtttcctaacggagatgagcaagaatgagcaactgcctactgcatccaattgcgctgctgctatcagcttgttctttaaggagtttaacccatctgcagcaatcgacgtgtggcgctgtattgtggagcacaacattaccccagctgaggactctgccaaagagctaatagcagggctgcttgattttggcaggtttactgaggtgacgaagcgtgctgatgagatgattgacatgagagttgagttgtcacggtccacaatggagaatatgaagcgtgcttttgctaaggctggcaggcaccaatcatatgacaacattgcaagaaggctaaagcgatattagctgcacatgaatgctttaatcagctgaaactttgcggctcacggggtagaagtttaacgcctggactgcttaattgcatgacaaccaagaatttggactagcctggatcctggaatgtaagtctggaaatctggaactgtactctgatcccacaagcagtggtcgggatgttagtgtagctcttgtagattccggaccccatttgttagctggttactcatcgagtgtaataagtggctagtttagtgaggctgcacattatcgctgtttatttttcagatatattttatgaatatgaaattgggttatgtaagtatcagatattcctggctgtcagcagcgtcaggcgcctctgctgatcctttgaccatattgtttttcgtggaagaagctttttaacttcttttttttccgggaaggtttg

SEQ ID NO: 5493 - DNA, 2074 bp, Zea mays
ggcgattgggtttctacgaggccggccgctctggcctggccggtctgcctcgtccgcttctctctcacccttcctccccctcctctcctgtgggtgctctccctccctctccccccccccccccccccccaagcccaaatcaccgggcctcgccccacagcaccggttgcgtgggaggaaggaggggaggcggctgtcgggcgagatgagcgactcctactgccccgactgcaagaagcatacggaggtggcgttcgaccactcggcgggggacacggtgtgcaccgagtgcggcctcgtcctcgaggcgcactccgtcgacgagacctccgagtggcgtaccttcgccaacgagtccaacgacaacgaccccgtccgcgtcggcggcccctccaacccgctcctcaccgacggcggcctctccaccgtcatcgccaagcccaacggcgcccagggcgacttcctctcctcctccctcggcaggtggcagaaccgcggctccaaccccgaccgatccctcatcctcgccttccgcaccatcgccaacatggctgacaggctaggtcttgtggctactattaaggaccgagcaaatgaaatcttcaagaaaattgaagatctcaagtctattaggggaagaaatcaagatgccatattagccgcatgtctatatattgcttgtagacaagaagatcgccctagaactgtgaaagaaatatgttcggttgctaatggggccacgaaaaaagaaattggcagagccaaagaatttatagtgaaacaactggaagttgagatggggcaatctatggagatgggaaccattcatgctggagattttctgaggcgtttctgttcaactcttggaatgaccaatcaagctgttaacgcagccaaggaggcagttcagcgctcagaggagcttgatataaggaggagcccaatctcaattgcagccgccgtcatttacatgataacccaactctcagaggacaagaagccacttaaagatatatccttggctactggtgtggcagaaggcaccatcagaaattcgtacaaggatctgtatccctacgcctcaaggctcatcccgaatacctacgccaaggaagaagacctgaagaatctctgcacaccttaggaagctttactttttttcccttctgttatataaatcggaattagatttgtcaaagaggagtgagtgaagttgttcctgttgtgaccgactgtactgagcaatgtgtcgtcgccggcgcgcttaactttgtggatggaccaatgagaacataagttgtcatcatcagatcgaatttcttttcagagcacctgccacctgaagatttttttgggatagcaaaggtgtcgttttcgtatactccctttgggaaaggatgtagatagcaagcagtccttggaagtgcacaagattttatttaaaagaacaggattctgttccccatcttcaaaagaaaccgtcatttatccatcattctgagtcaaacaaaatgtttagccaagttgtcaactcgctattagccaattagctgatcaatcctaacttactgatcaacccagcaaatttaagttaattttagccctggccatggcaagggggaacatccttgtccttaacgttgcaagggggaaacatcatgtgaacctttcgaagaaaagtctctgttcatgtatggcgtgtttggtaggctacatatgggccggccaggctgctgtatctgagatacacgtttggttgcttgtctctgtatctggtggactgaagggtatatctgtgctcacctgcattgcgggatgcaacagagtcaggctatggagaaacgggtttcatttctgtgtctcaggatttggttgcttgtctctgtatctggtggactgaagggtatatctgtgctcacctgcattgcgggatgcaacagagccaggctatggagaaacgggtttcatttctgtgtctcatgagtggctagcctgtttggagcggccaggctacactgccaaacgaaccaaacatgctagtagtatttgtcacccgtgggcaggttagcagggg

SEQ ID NO: 5494 - DNA, 2664 bp, Zea mays
ttgaacctggggaatctgtgaccgatgatcgtatattgggtgcccgcatgacaaaggccagccttgttcctccagttactaggaagtatgaagttatcgaggagtaccttattgtagcagatttggaggaagtacagcgaaaaatgagagttgctttacctgatgactattctgagaagttccgctcgcggaagaatggcaccgaaaacttggaacttccagaggttaaggattatcaaccccgaaaagtagcaggagatgaaattcttgagcaagaagtatatggcatagatccatacacacacaatctactgagtgacattatgcctgctgatcttgagttgtcacctaccgacaagcatatctttattgaggagttgcttctgaatacattgaataagcaagttaggcatttcactggttcgggaaatacccctatgacttacaaccttaggcctgtcattgaagagatccaaaggtctgcagaggataatggtgatagacgaacttcaaagatgtgcttggggatgctaaagaccatgagaaatcgctctgaacagaacttcgttgcttatagaaagggtctcggtgttgtttgcaacaaaaaaggtggatttggtgtcgatgactttgttgtagagttctttggggaggtttacccttcttggagatggtatgaaaagcaagatggtattaaacatatacaaaacaacagtgaagatcaagctcctgagttttacaacattatgttagaaaggccaaagggagacggagatggatatgacttggtttttgttgatgcgatgcacaaggccaactacgctagtagaatctgccactcctgcaacccaaactgcgaagcaaaagtgacagcagtgaatggtaaataccagattggagtttacacacttcgaccaattgcagaaggcgaggaaatcacttttgattacaattctgtaactgagagcaaagaagagcatgaagcatcagtctgcctctgtggaagtcaagtatgccgtggcagctatttgaatttttctggtgaaggagcctttgagaaggtattaatggaattccatggtgtgctcgataggcatagcctgctgctacaggcttgtgaaacagactctgtctctcaacaagacttaattgacttgggtagagctggtcttggtacctgtttgcttgctggtttgcctggatggcttgttgcttacacagctcacctggtgcggtttatataccttgagagacagaaactccctgatgagatcttaaggcacaatgtggatgagaagcgccagttccttatagaaataaacatggattctgagaagaatgatgctgaggttcaggcagagggagtattaaattcaagattacagcaaatagtgcatacacttgacaaggtgagatatgttatgagatgcatatttggagacccaaagaatgctcctcctcctcttgtaaggttgtctgggaaaagtctggtatctgccatctggaaaggggacagttcaatagttgctgaactcattcagtcgatggaacctcatgttgaagaagaggtacttagtgatctgaaggccaaaatccgtgctcatgatccgtcagagtctgaagatattgagggaggcatccggaattctctcttgtggctgcgtgatgaattgcgaactctttcatgcacttacaagtgccgtcatgatgctgctgcagatttgattcatttgtatgcttatacaaagtgcttcttccgagtccgggattataagacagtaaaatctccaccagttcatatcagtccgcttgacttaggccccaaatatgctgataaactgggaccaggctttcaggagtactgcaagacatacccagaaaattattgcttagcccagcttatctattggtatagccagaattcagaacctgaatctagattaacaagagctagaaaaggttgcatgtcgttgccagatgtctcatccttctatgtgaagtctgcaaagccatcacaagagcgagcttatggaaacagaactgtgagattcatgttatcgcgcatggaaaaacaggcacaaagaccatggccaaaggataggatatgggtgttcaagagtgatccgagattctttggtagtccaatgatggacaccgtgttgaataattccccgcttgacaaggagatggtgcactggctcaagactagaccaaatgttttcctaggctagtaaaaaaggtttgtaggcagataaggtggtatttggttctttctcctttttggagattttagtctacatgattctttttccgactcacaccttggctacctgatcatggggagtttagcttttagatagcagggtagtctcaccacccccatctgtacattcctctctccctactttccttgtagagatgtatctggttaataactgatagattcgtcattgatttgatgtagtgaattttccccataggaacgctccctcttctgtttcatgtaaatgcagaacaatttcaatcttgaattcagtaatgtgttacaggcatgttgcatttcagaagatcaaaaagaaaagaaaatcaataaattgttttaggggcttataggtttcattcataggaaataatctgtgcatgagttttgatgattgaacctgt

SEQ ID NO: 5495 - DNA, 2843 bp, Zea mays
cctcgaggccggccgggttcccccccccgccatttttctcctcccactgattttgcattttagcccctcaggaagctccgatttcggccccgctccggcggaccgcttccgttcgtgctctgctccgaccgagcttgccgcgccgtgggggacagctgcgaggactctcgttcggcggctctggttctcggcttggtcccgtttcttccccaacaaatctcgtgatttttggttcagatttggcttctcggcgcccgtctgggtctttctcgtgcgtttcgcctttggtttcgccgatttggtgccggattcggtgggttgcggccgagtagcctggatctcgggcgccggtctagcgctaggagccctcacactgtggatttcctgccggaggaagcttttcaagggagctagtagctagtagctagctgcctttgggagcagtagctcttctagtctctgaaggtttcaccatacgcggtggagagcgctattagcttgaggagtagatttcgtgtagcggtgagcaaagtttgggtgtcaagtctggtggtggaagccttcaggcttgagattttctccctcacgacaccgaaggagcacgccggctctggaaggaatttcctgccatcccagaggctgccgatttcctccctcccgggaagcaagcaagggctttcttctagacgagctcttctggttccttaagtttgtgggccgtggctatttaatctccaactgcatccccagatattcaccaaattctgtgagactgggaactccgggattggtttggataaggtgttctgggaatggggaaccaatgcccaaacgggacccttgggagtgactactacaaccgccccgcttccaggttcgctgatggttgccttgaggacgatcgctactctgacttgaagaagtttgacaagccatggcctgaggtgaactcgtttaagcccactgctgttggtattttgaagaggggattggatccaacgtcaatcactgtccttgaaaggaagacggccgacgtaagggaacattatatcatcggtcggaggcttggtcaaggccagtttggcacaacattcctctgcaccgagatcagtacagggtgtgagtatgcatgcaagacaatcccaaagcgaaagctcatcaccaaggaggatgttgaggatgtgcgccgtgagatccagataatgcaccatttgtcaggccacaagaatgttgtttccatcaaggatgtatacgaggatgggcaggcggtgtatattgtgatggagctctgcgccggtggggagctctttgatcgaattcaggagaaagggcattacagcgaacagaaggctgcagatctcataagaatcattattagccttgtggctatgtgccattcacttggggttatgcaccgtgatctaaagccagaaaacttcctcctttgggataaagaagatgacctgtcaataaaagcaatcgattttggtctatctgtgttcttcaaaccaggtcaggttttcactgagctggttggaagtccatactacgttgctcctgaggtactacacaaacggtacggaccagaagcggatgtgtggtcagctggagtgatactgtatgttttgcttagcggggtgccacctttttgggcagagacgcaacaaggtatatttgatgctgtcttgaaggggcacattgattttgactcggacccatggcctaagatatctgaaagtgcaaagaatctcataaggaagatgctctgcccttgtccttcagagcgtctgaaagcccatgaagtactacgccatccttggatctgtgaaaatggagtggctactgatcaggctcttgatcccggtgttctctctcgtctcaaacaattctccgcaatgaacaaattaaagaagttggctctgagagtgatagctgaacgactttctgaggaggagattgctgggttaagacaaatgttcaaggcagttgacgttcaaaatagaggcgtaattacttttggtgaacttagacaaggtttaaaaagatatggtagcgaattggagaatagagaaattagtgatataatggaagtggctgataatgacaataatgtgaccatcaattatgaagaatttatcgctgcaactgtgcctcttaacaaaatagaacgtgaggagcacctgatggcagcttttacctacttcgacaaagatggaagtggttatatcacagtcgacaagctgcaacgagcttgtggagaacatgacatggatgacactttccttgaagagataattttagaagttgaccaaaacaatgacggtcagattgactacgccgaattcgtagccatgatgcaaggcaacaaagttggacttgggtggcaacaaatggaaaccactttgaatgtaaccttgagagatgcacctcaagtacactgtcactgacgcgctcgccatgtacagattttgttctcttctcgtgttcatcgtttctccacacgacctgagagttccggtcgacatgacatgtatcacgaggagagagcaaatcaatcgattcatttagtggtatttatcccaaataaagtgtgggctggcaggcagaatatggtttgtcatgagagacactagtatgggtttatatgtataaatatatagcagtggtggtatattggtttatggtagcgggtgatcctgtcaagcgattcaatcgaaataccaaaagaagtgcgttcagtttgcccgttttgttacgggtttcatgaagatgaaggtgattatgttttctcatgtcgagatttgcacttccttaaaacgcagctgattccccaattctttttt

SEQ ID NO: 5496 - DNA, 1338 bp, Zea mays
cattgggtccctcgaggcccgccggagtgccctagtaaccctagccgcctgaggccgacgccaactctctcctgaccgcaacggggaactcgacccccgcctccgccaccgccaccgcgccggtcgccgacccactcagatgaacacgtctccgtccagatacagggcaatgatgggaggctgggggggttcggatgggtacgagggatcaaagaggacgcgaatgatgatggaatcgaatccctacttcgcagtgaacgcagggagcccactggatgtctcaaagagggcaaggatgatggaaccaggtgctccctattttggggctatgggaagcagcgccagcggtgccggcggtggcttctaccagccctttaacagcaacctagctggtgcagggtctagcaccggtatccaaagcttcccatgtgtccggctgcgaggcctcccctttgattgcaacgacattgacgtctgcaagttctttgtggggctggacatagtggactgcctcctggtcaacaagaacgggcgcttcaccggcgaggctttcgtggtcttcccaacagccatgcaggcagagtttgcgctgcatcgcgacaggcagaacatggggcggaggtatgtcgaggtgttcaggtgcaagaagcacgagtactactgtgcaatagccaatgaggtgaaccagggcggttatttcgagccggagtaccgccgctccccgcctcctccgaggcctaggaagccgtctgaagataagggcagcatggagtacacagaggttctgaagctccgcgggcttccctactctgccaccactgaggacatcatcaagttcttcctggagtacgagctggcagaggagaacgtgcatatcgcctaccgcaccgatgggaaggccacgggtgaagccttcgttgagtttccgacagctgaagtcgcgaagacggccatgtgcaaggataagatgaccattgggacgaggtacgtggagctgttcccgtcgaccccagaggaggccagcagggcgaaatcccgaggcaggcattgaagaaacgtgttccagtgatcttctgtatgcatgcatgcggccgcgttcgagctcagttttcattttgcatgcttgcctctgtgtgtcgctgttaggtggtgttaacctgagctgtcatgtttcgctactgatcgtgcagtgatttgttatatctgaagttctgaactgaattgtaacagttgtcttctgttggatgcacttgtatggcatatcgttttctataaaaacacgaaggttgcttgtccaaaaaaaaaaaaaaaaaaaaaaaaaaaaaaactcgagcccgg

SEQ ID NO: 5497 - DNA, 2951 bp, Zea mays
ctcacgcgtccggtgggacagccacaacagattcgaggccggccgggtttctttctcgctcctatcatttcgttccgttcctgatacaggcgagcagggacgactgcaggcctccccctctttctcggcttccactcacccgccaccactggaccacccccaacggcgagggagtgagagagatcggcagcagctcgggggcctggcagggcagctgcattgcgctgcggcgggcggcggccatggccgattcgtacggcgacggcaagggcccatcactcaagagccagagccagaaccagcagccgcgccctggcccccgcctcaagcccgccatcgagatggaggatctcatcaacctcctccacggatccgatccagtccgggtcgagctcacccgcctcgagaacgaactgcagttcaaggagaaggagctgggcgatgcgcaggcggagatcaaggctcttcgcttgtcggaccgcgcgcgcgagaaggccgtacaggatcttaccgaagaattggcaaaggtggatgggaagctgaagctcacagagtctctccttgaaagcaaaaaccttgaagcaaagaaaatcaacgacgaaaaaaaagcagcgcttgccgcacagtttgcagctgaggcaacactacgaagggttcatgcggcacagaaggatgatgacatgcctcctattgaggccatccttgcaccactggaagctgagctgaaactggcccgtcaagagattgcaaaattacaagatgacaacagggcattggatcgtcttacaaagtctaaggaagcagctctgcttgaagcggaaaggacggttcagatggcactggcaaaagcttccttggtggatgatctgcaaaacaaaaaccaagagttgatgaaacagattgagatatgccaggaagagaacaaaatcttggatagaatgcaccgccagaaagttgctgaggttgaaaagctcacgcagactgtcagagagctagaagaatctgttcttgctggtggtgcagccgcaaatgctgtcagagactaccagcggaaagttcaggagatgaatgaggaaatgaaaactcttgatcgtgagctagctcgtgcaaaggtttcagcaaatagggttgcagtagtggtggcaaatgagtggaaagatggcgatgataaagtaatgcctgttaaacgatggctcgaggagcgaaggattctgcaaggagaaatgcagcaactccgggacaaacttgctattgcagaaagggctgcaagatcagaagctcaactgaaagagaagttccagctacgacttaaggtactcgaggaaggattgagaatgtctacatcgagaaccaatgtcagtggcacacgccgccagtctattggtggtgctgatggtttgtctaaggccaacggcttcctgtcaaaacgcccatcattccagatgagatcaccagtgtctaccacaacgactctagtgaaccatgcaaaaggagcgtccaagtcgtttgacggaggctgtagatcacttgaacgctataagggccatgtaaacgggaatggtatgaacgtatctaccgattccagtgaagataaagattcaaacaactcagatgagaagtgtaacgagtttgcatctgctgagtcggaggactcggtgtcaggtgttctatatgatatgttgcaaaaggaggtcatttctctaaggaaggcgtgccacgaaaaggatcagagcctgaaagacaaggacgacgcagttgagatgttggcaaagaaagtagatactttgacaaaagctatggagtcagatgccaagaaatcgaggcgcgagctagctgctatggagaaggagctggcagctgtgcgcttggagaaagagcaggataacagggcaagacgttttggtagttcaagcggttctgccagcagttcgcagctcccacctggcaggactttacctaggagcggctcggcgcgcaacatgtgaaggcatgtaggaattgaccgaatatggctttgatgatccttacttggattaggactggtgactgggaaggaacctctcattgtcctggagaagatggcatcagcggaagagcctcttctgcctacatctcgtggtcgcagggatgaactactttgtgtctaacatctccggctagtgttttcttttcttttgttttgacgacgtgtcattcggtggtgattgctgttgtttcttttcttttggcaatttgatgatctttgttggtgctgtataggtttggtgaggcgttgctcctttttcttctttggtttgtttgttcgacatatccgtcggtctggttgtttacgatgtaaaatgtacgcactgaagagttgcttatggtttgcctgatattcccccctgtttctgtcagtgttgggcaagttgatgataaccagcatgatgaatgactcagctggctgttgtaaccatgtgccgaatgatgaagaaaccgctttgcatatgtctgatgatcaccagatgaatggagttagggcaagttcgaccgctttgcatatgtctgatgatcaccagatgaatggagttagggccagtttggtgcggcggcgcgtctaagccgcggcggctgaatcggccgccatacctgcggcggcaaaactacggcgcgccgtggcggcttaggccacgcacccaacagccccttaaactgctgttacttttttttttgttttttttgtcagattataaagtgctggatttggcttggcaaggtgagaatgagagtaacctttactagcgctcgctgttgctgtgcgctgtgcagggcgcatctatccgcatctccgcccccccccacggtggcatcgcctcgcctcgcgtcggatcaatccatcccctcgccctcgccttcacgccctgcctacgcaccctgtccccaatccctccgtgcacccccacttcgctcgc

SEQ ID NO: 5498 - DNA, 1779 bp, Zea mays
  misc_feature (1759)..(1773): n is a, c, g, or t
acccggtaaaacaactgcggcaaaactcaccaagcccccaaactgttaacaggtgataaagcttttctctctcttggccggccagtgacatcagacatcaccaactcgtcgacggtagagagagcaagctcttcggcgatttgagaagaatcgaggagcgagcgagcgagcgagcgagagaggaggaggaggagctggggcttgagcctgcgcccgggggccccgggtcacggaatcctaccattaccaaccctagccttcgttgatcgccgtctcaggtcatggcagggccggcgccggatcgggccgccctgactgtggggccgggcatggacatgccaatcatgcacgacagcgaccggtacgagctcgtgcgcgatatcggctccggcaacttcggcgttgcccgcctcatgcgcgaccgccgcaccagcgaactcgtcgccgtcaagtacatcgagcgcggcgagaagatagatgagaatgtccagcgtgagataattaaccatagatcattgaagcaccctaacattattaggtttaaagaggttattttaacaccgacccatcttgctattgtcatggaatatgcctctggcggtgagctttttgagaggatatgtaagaacgtgcgattcagtgaagatgaggctcgctacttcttccagcagcttatttcaggagtaagctactgccattcaatgcaagtatgccaccgtgatttgaagttggagaacacacttctagatgggagtgacgctcctcgcttgaagatttgcgatttcggttattccaagtcatctgttcttcattcccagccgaagtccactgttggaacacctgcttatattgcacctgaagttttgttgaaaaaagaatatgatggcaagattgctgacgtttggtcatgtggtgtaaccctctatgtaatggttgttggcgcatatccttttgaagatccagaagagcctaagaacttccgcaagacaattcagcgtatcttgaatgttcagtacgcaattccagacaacgtgaacatatctccagagtgcaggcatctaatttcgaggatttttgttggcgatcctgctacgcgaataacaatccctgaaatccggaatcatagttggttcctgaagaaccttcctgctgatctgatggatgatgatagcatgagcaaccaatatgaggagcctgaccagccaatgcagaccatggatcagatcatgcagattttaacagaggccaccataccacctgcctgttctcgcagtataaatgtcctagctgatggactggacatggacgacgacatggatgatcttgattccgactcagatcttgatgttgacagcagcggtgagattgtgtacgcaatgtgagtaacatctcagcagccatctcagcagtcaaccaaggaaccaatcaggcatgggatgccctgttgtatactctggcaaagggcatgcttccttttgtgaaaaacatccatgtagttttctcaaggaatcgcaatgtgttctgtggaacacatatgttgtagtcaaactcgggttactcagcttgtaaaactagcctcctcttgcttcctggttactgggctttggatactctcaggcttcgacttgtgtgttgctgttaaatatgtataagaaacttctactcaggttgatctgtgaatctggattcgggtagtggttttgctcaaaaaaaaaaaaaaaaaaaaaaggcccaaactcgagggggggcccggtacccnnnnnnnnnnnnnnnaaaaaa

SEQ ID NO: 5499 - DNA, 2745 bp, Zea mays
tttttttttttttgacacatacagctacaaagtaatataatttttctttttagacttttcttacaaagtgggtattatacataccactggtttccatccagcagattgtgttaccattgttcaccattcaacagtaaagcttggatttataggcaacacagtaatatgctacataatgtacagactgagctctctttattctataaaacgggtaatatggtatacatatcaaatgtacatacaacttctacatcagggttagtatttacagtaggaaaaggcaatcctctccagctataaggagcttccattgaaatgtttactgaaagcttcttcgtccttgcagtgcacccacaagaccttgtacacctcaattagcaactttggaaatcggctagcaaaatagtgatcaaatccctctggcaatgacccaagtatgcccttgagatcatttgaaagttctctgtaatgacccgatttatttctgatatacctcagaagatcacgagtagactcaaagttatattttctataacgacccatgtctgtaactaaagcagcatccagtttctctccccatttcccaccaaacgccactggtcctatgctttccagtgcgtttatgaggtccgtttcactggttttctcaattctgtcactggtatcccttagaaacgaaaggcgcaattcagggctccagaagagaggatgatgcatgacgtatactgccgttggtcttgtctctgggtttggttgtaacagttgagatataagatgtactgcttctggtatgtagtccaccacaaagagatcaaagcgattgtttacaatgtttgtatcccgttcatagtattcaccaaacggatgcttgcctttagtgatacaatagaaaataaggcagcccaaactaaaaagatccattgcacgagtttgacgaccatgacgaagctgttcgggtgcttgccagccagagcttccaattcctgtaccatgatggctaacagaagtcatgtcatcttgcaggtgcttactgatacccatatcagaaagctttgctctaataggtccttctgcgcttattaagacattctgaggcttcaaatcacgatgaataattcccaagttatgcaaatgcacaaggccagcaaccacatctctcatcagcttcaggagttgtgctgaaggaagcccatcctgcgtccacaactccacgtctattcccttaacatttgaaatctttgagttgatgctcatactgacctcattgttagaaatagactctccagaagacaaatatgactgtttttggattaggtcagccaagctgcagtggcacctctcaagcgagatataaacaaaatcactgtcatggtcacaaccgtagagtctaacaatattaggatcatgatccgatataataagatttcgagtctccttttcggctatgtcattgtgggaacgcagcagacgtttcacggcaacttgacgaccatcataagatccttcaaaaacaattgtgccattgctccctctgccaatttctttattggagacatataccttaccaatctgacgaccaccaagggcatctgttagcgcagaatttttcattggtgcctcagttgacccaccagtatcactgcactccttgtcagatgctgtcaaggtctcagagctattgacaagtccatccttcttccgtgtttttctttttttgggagttccctccgacctgcctctaatgtccaccgatttcttgttgtgcgtgaatggctcaataagttgaatcataaactgcctgcatgacttgcttgcagatatcaagctcaacagataaccagtgaccaaaaatatgggaaacaaagggaatagccatccagaagtgttcctagtggggtttagggtagcttcaggatcggcagagatggcatgagatcgagcaacatcatgagtttgattttgagaatcatccaataggatatttgacttcccagcagtgtttggtagcttccttggggtttgaactggttccaaagcatcagaaccatgcatagaaacaaaaggggtaccatctttcaagacaattacattagctgaatttaaatcaggtaaagcaagtggcaaaccctcagttctaatgcatggaatgtctccttgcaggcaagatgactgatcaagcatgtcagggtgcttgtatttcacatagtagtttgcagtgaaagaagttcttgtccagttaaataaatgattgccaaggtctgatgcactgagagaatagtcagttctcacaagcactatgatattatcactgtcatcactagtacggacatttagcttggatggtgctccttcaacccctggtccttccaattcctttaacgcagatgggatactatgcctgtaaataatctcaccactatcagcatcaactacaaaaacagttgaaacttttgatccgatagtaacaacagaatcccgaatatatgggctcctggcaacgaattcctccaatttccatgggagcctctcccggtcgccccttataaacctccaaaaaatcagtactattcccattcatgttctcgttcccattgaaaggataaatgaggtaattcggaccagactcagtggtagtaatatggtctgagagtggaaggccctgtggcaatctcccacagaggagattgagacagcttgtccacaagctgaatcgtgccattgtcgtaaaactggagcacagatctg

SEQ ID NO: 5500 - DNA, 1837 bp, Zea mays
ctcgaggccggccccgccgtcctccaaacgggacctgccacgtcacgtggcaacgcgtcataggtgtgagtgtgagtgtgtgacactgacatctgagaccagctctcctgcttcgcggctgtctctttcatcggccacccacggcggcggagcatagcagtaagcaagcagcggagacgccggagagcggtgaagaagcatggagatggagcagctctgctcgctgctccgcgacctcgacgcgctcaagcagcatcccgacgatctcacttccaccatcgatcggatgcgggagcggctagtggcgatgatgaatccggcagccggtgccgcttctcgatccaagattaaggacatgagtgcagaagtggtggacaacaatccctacagcagacttatggcgttgcaacggatgggcgtagtggagaattatgagcgcatcagggactactccgttgccatcgttggcataggtggcgttggtagtgttgccgcggagatgctcactagatgtggaattggacggctgttgttgtatgactacgacacggtcgagttggctaacatgaataggttgttctttcgcccagaacaggttggaatgaccaaaacagatgccgctgtacagacactttctggaataaatcctgatgttgtgttggagagctactcattgaatattactacagtcaaaggtttcgaaacatttttggcaagtttaaaagcacaaagttctcatgagcgtagcactggagttgatcttgtcttgagttgtgtcgataactatgaagctcgtatggttgtaaatcaggcatgcaatgagcttggtcagacgtggatggagtctggtgtctcagaagatgctgtttctggtcatatacaactgctggttcctggtgaaactgcatgttttgcatgtgctcctccattggttgtagcatctggagtggatgagcgtacacttaagagagaaggtgtttgtgctgcctctttgccaactacaatgggtgttgttgcgggtctcctggtccagaatgctctgaaatatttgttgaactttggacaagtttccccttacttgggatataactcacttaaggattatttccctgcaatggaaatgaggccaaatccacaatgctcgaatccagcatgtgttcacagacagaaagaatatatggaatccaaacctgctagagatgcagcagcgaagactaagatggaagctgaagcatccacagaaaatgaatgtcctgtccacctagacaatgagtggaatattagtgttgttgatgatgaagaaactgagacatcaagcattcgaaacactccagatatcctaccagaaggtcttgtccgtgagcttccagacgctgattcatacgcaggaccagctgctccagtgagttccagcgctattgatgatgatgatgatctcgaggagctccagcgtcaacttgatgccctaaacgcatcttagccttaataagtaggctagttcatctgcgccttaattggcttctccccaatcccaacttggatggggaagatgatttacatactgtttttcggagttggtaaattcatagcaccgtggtaaaagaaaaaggagaaaatgatagctatactgcttttgggagttttgacttacagttttggttgagatctgagaacatgtgcatgtctgagccagacagctcgtcggtaatggtactaatgtctgaatttttgttgctgttgatattcaaaggttttatctggaaccgtcatttcttattgagaggttccactaaaaaaaaaaaaaaaaaaaaaactgcgggggggggcccggtaccca

SEQ ID NO: 5501 - DNA, 3077 bp, Zea mays
agatgaggtatctttctctggtgcaagccatcctgccaatatgtacacacaagaagaccttcccaaacaagtttctcgtacccttaatcagggttctaatgttatgagcctggatttccaccccgttcaacaaaccattcttttagttggaacaaatgttggtgacattgcggtgtgggaagttggttcacgggaaaggatagctcacaagactttcaaagtttgggatattggttcctgtaccttgcctttgcaggcttcgctgatgaaagatgctgcagtatctgtcaatagatgtctgtggagccctgatggaactattctaggtgttgctttctcgaagcatattgttcagacatatacttttgtacctaatggagatttacggcagcaagcagagattgacgcacacatcggtggggttaatgatatagccttctctcaccctaataaaactctatctatcatcacatgtggtgatgataaactcatcaaggtgtgggatgctcaaacaggacagaagcagtacacatttgaaggccatgaagctcctgtgtattctgtatgccctcactacaaggagtccattcagtttatcttctctactgccattgatggaaaaatcaaggcatggttgtatgattgcttgggctcaagagttgactatgatgctcctggacattggtgtactaccatggcttacagtgctgatgggacaagattattctcttgtggtactagtaaagaaggtgattcacacttggttgagtggaatgaaactgaaggggcaattaagagaacatacaatggcttcaggaaacgttcactcggtgttgttcagtttgacacaactaggaatcgcttcttggctgctggagatgaatttcttgttaaattctgggatatggataacaataacatactaacaacaacagactgtgacggtggactgccagcaagccctcgtttgagattcaatagagaaggttcattacttgcagttaccacaagtgataatggaataaaaatacttgccaacactgatggacaacgcttgcttaggatgcttgagagtagagcatttgagggctctagaggacctcctcaacaaataaacaccaagcctccaattgtcgcccttggtcctgtttcaaatgtcagcagtcctatagcagtaaatgccgagcgacctgatcggatcttgcctgcagtgtcgacaagtggcttggcacctatggatgctagcagaactccagatgttaagccaagaataacagatgaatccgaaaaggtcaaaacctggaagttggctgacattgttgataatggacatcttcgagccctgcatttgacagacacagacactaatccaagcaaaattgtccgtttgttatatacaaataatggggttgcactcttggctcttggctccaatgctgttcataagttgtggaaatggcaacggagcgacagaaatcctagcggcaagtctactgcatctgttgcacctcacctgtggcaacctgcaaatgggattctgatgacaaatgacacgaatgatggcaacccagaagaagcaaccgcctgcattgcattgtcaaaaaatgactcctatgttatgtctgcatctggtggcaaagtctcgttgttcaatatgatgacattcaaggtcatgactactttcatggcacctccacctgctgcaactttccttgcattccacccacaagataataatatcatcgccattggaatggaggactctaccatccaaatctacaatgtccgcattgatgatgtcaaaagtaagctcaagggacatcagaagaagattacggggctggccttttctcaatcaatgaacgtgctagtatcatcaggtgctgatgctcagctatgtgtgtggagtattgatggctgggaaaaaaagaaatcaagatatatccaacccccagcaaaccgacctggcactttggttggtgacacaagggtgcagtttcacaatgaccaaacacatcttttggtcgtccatgagagccagttgggaatctatgatgggaatcttgactgtttgcgcttgtggtctccaagagatgcactcccagctccgatatcgagtgcgatatactcgtgcgacggtctcttggtttacgctgggttctgcgatggtgctatcggagtcttcgaagcagaatctcttaggctgcgctgccggattgctccttccgcttacattccaccttcaatactagcctgtgctggacgggtctacccgttggtagtcgctgcacaccccatggagcctaaccagatcgcgatcggcatgagcgacggcaaggtccatgtggtggagccattagacggggacccgaagtggggatcggcacctccacaggacaatggagcgcacccgcacccgcatccagcgatatcagcggcaccgtcgaccgccaccaaccaggcatctgatcagccaacaaggtgactctggcctgcagcactggaggagattcgttagcgcagagactggtaggacctgtaggagatagggagaaaaggtaaacgattagatgacgagaggatgatgctatatttatcaagtccgcagcgccctgcctctcttgtgacggcccgcgacacaagtgtggtgattgacagtgacatcgctcactctaagttaggttttggttcttccctggcccccggaaatcatcacctggcgccgccacattcgaatggagatggatctgctggcatcatcttgcttcctcttttgtaaagcttttcctgctgagtttagtggtaccttagattgtcgtccatttctgccctgttctccgggcagctatttgtagtgtaaaaatatggtggcgtgctggatggtgttatttatgcgtgcgtggcctgtcatgacgaattccaccatgtttggggctatttgatggatgtttactgatcatggctcgaaattatttttttcttcgtgccatttgcaattgtagaccgtggacgcggtgtgagttgatgagatttgctggtgagctgtttctggaaaaaaagggggggcccggtaccca

SEQ ID NO: 5502 - DNA, 1620 bp, Zea mays
attgggacctcgagccggcgaagccacttggcgcacgcgctgacgcgcacccgcaccagcctctagtcggccagtcgggacgaagcctctcgaacgagcgaggccacgaggtgcccgccgcgcccagccggcctcgccgaccgggcccgccggcccctatataggcaggcgccacttcctcctcgcaaccaccagacgccagtccaccaccgcttcccgtgcagcgccctccctctacgttcccccatttcctgtgttggcggcgatggcgcggcacttcgtgctcaacaccggcgccaagatcccctccgtggggctcggcacctggcagtctgaccccggcgtcgttggcaacgctgtctacgccgccgtcaaggcgggttaccgacatatcgattgtgccagagtttacggcaacgaaaaggagattggtttggcgctgaagaagctatttgaagagggtgtagtgaagcgagaagatctgtttatcacctctaagctatggaatgatcatcatgctcctgaagatgtgcctgaggcactaaatgacagcctgaatgatttgcagcttgagtacctggatctttatcttatccattggccatttagagtcaagaagggaacaaataccagccctgaaaattttgttacacctgacttccctgctacttggggggcaatggaaaagttatatgatgctggcaaagctcgcgctattggtgtgagtaacttctcctcaaagaaattgggtgacttgcttgctgtagctcgtgtacctccagctgttgatcaggtggaatgtcatcctggttggcagcaaactaagctccatagcttttgtcagtcaactggtgttcatctaactgcttactcaccactaggttcacctggtacaacttggatgaatggtaatgtccttaaagaaccaataatcatctcaatagctgagaaactcgggaaaacttctgcacaagtggctctgcgctggaacattcagatgggtcacagtgttcttccaaagagcacgaatgaagaaaggataaagcaaaaccttgatgtttatgattggtcaattccagatgacttgcttgcaaagttctctgagattaagcaggctaggctacttagaggcaacttcattgtgaatccagagagcgtttacaagacccatgaggagctctgggatggtgaactttaggaaggacgccgttgtccgtcctgactcctgagcagggagcaagcagcgttccattagggcccgtcagatcatttcacctccaaagttgctcttttgaaatgaaggttcagtgctcggaagctctggtgccatcctgtatcacgaactattgagaaatttatcggtgattttactttgtgctacgggatgtgctgctgcagtctatcctagtgtcagttgatttttctggtaaaactgtgaccaaataagttaattcgccaggcatcattactattggaatttcatcgttttatctcctcactattttttatgctccatgtattctctatgatgagaccatgttgagtagttcactcatataatcacataaaacactgttttacattatcaacagagtaagctgctgaacgtgctaagtgccg

SEQ ID NO: 5503 - DNA, 2284 bp, Zea mays
aagcaaaatcatagaaatcttgttttaactcaaaaagagagagatcggattagtttttttttccctaaaatcatgctctacactacatcatacaagactgactactaatattgaacaagctaaataaatatgttctcagattccactaatgttacaagttacaacaacaagcacaccgtgcataaacatacagcaacttagaagatgctccaagtcctagccaacaaaggaaagggaaagaaaatgacttctaggttttcacgtctccttttggttgaccaagaagagatggtcggtagagtgaatggccttgtgccatctcaattctttcgcgtggatcatacattgtctcatctcttatagcctgaagaatcgaatcagcaggacggtccctcatgatcagaatcctatgtagtgcttttaggatcgggcacatctcaaccggcgcaacagatctgttggcttctggatgcatgacacttaagctatcctgactaagaagctcataaaacgcatcaactgcagagacaccctgaatggtcccttttcctttaatactgtcacccatttctaatgtcaattcacctttagctaacttctgcccataccatgcattacgacctttcaacaatgtgacataagtgtcagctaataagggtccagcaagtttttcaggttcttcttccagaaggtgtgtgatgtagatcatctcagatgtgcaaagtgcaaagtaaacagatttgctggttgcactctcgttggttagtgcagctaccataccagcaccaatagcatagacattttttaagccacccatgacttcatgagtgatgagatcactgttatcccacacaataaaatgaggctgcctcaaaaactttgcaaggggctttctccatttgtcagctccacaaatacgtgcatttgcatattctttgttgtaaatttcagaagcaatattaggtccgccaagataaagaatattctctgatggaactccagttgcattgctaatcatctgcgtgggagttatgatccgtgggagtggatccagcgaggcctcaattcctttggcgagggagatgatgatgggggcagtaatcctctccttccagtacctcctgatctccccgaacacctccctggtgtcggtggaaggcaggccgttgacgacaatgtcagcgtcccagacggcctcctgcaggttggtgacgaccttgagcgggcagagcggcgtgtcgatcatgttgaggcagaagccgtccctgagtatctcgtcggcgtagagcgtgcggtcgccgaggcgcgcctcgacgtacttgaggtaggcgcagcggcggatcaggcggcgcaggacgtcctcgcgcgcgttgatgacgtcgaagaggtgctcggcggtggcgcggtcgacggcgcggcccgggcggcgccagatgcggacctgcgccttgtcgcggaggtggccgtacgcgtcctgcagcagcgcgcagaagacgctgccccaggcgcccgccccgacgccgacgatccggagcgggtcgccgtccgccttccccagctgccgccgcagcaagtccagcttctcctccaccacggccccgttcgcatggccgtccggctggcccagcgcctccgccccgcccattgccctgatctcctccgcctcttcctctctcgccgaaagcaaggcaggctacataacccggtctgtctcgttcggcagaagaggagagacggggaaggctggattaagcgacggcagcaaagctataataactaactcggggagagagaaaggagcggacggcttttcttttggccgaaacgagctcggatcgacgcgaattcgggtgggtttggccgccgaatcgcagcgaggcgaagcgtcggccgcgacggccggagagcccgagggagtcggggcttgctgccggcccgccggccctgtcgcggttgccggttgggttggtgcgccagtacacgtcgcctcgggctctcgatcagctcggccagattggcgcctgctgcccagtgccccacgaggtagagagaacagtgacgcggtcgtgcgaaagcgagttgggccacgtacgggggagatgtggcattgtggcaggtaggtgagaagggggcggggcacgggcgggggttggtggtgtagagtgtagaccggttcgaggattttgaagcttcgatggatcacgatcaccatggtggatgacgtcggcagattctgacttgtgagcttcgcccagggcccaggcccagctaccggcgccagggg

SEQ ID NO: 5504 - DNA, 1363 bp, Zea mays
cggacgtgtgggtttccagggtcgcccgcgtgcttgacgcgtaactgtcgtctaactgtgatggaaagtacagtactgtacgtaacaacaactgctctggatggaaacacaagcaggagctgctggaggagctgggcgtgtacatggtggcgttcgaccgggccgggtacggcgagagcgacccggacccgcggcggtcgccggagagcgcggcgctggacatccaggacctggccgacgcgctgggtctgggtgacaagttccacctcgtctgctcctccctcggttcccacgccggctgggccgccgtcaggtacatcccgcacaggctggcggggctggcaatgatggcgccggtcatcaactaccgctggcgcgggctgccgcgggggctggcccggcagctctacgggaggcagccggtcggcgaccagtggtcgctccgggtcgcctactacgcgccgtggctgctgcactggtggatgagccagccgtggctgcccacctccaccgtcgtcgacggctccgcgcccttccccaacgcgctggacgagaagaaccgcgtcatggcgctctccaacggcatgttccactcggttcgtctcgcctcgctcggttgccctgccttagttagcttctctctgtctcccaccacaatgaaacggacttcgatctttctttcttgcagagggcgaggctggcgacgcagcagggcgtacaggagtccttctaccgcgacatgacggtcatgttcgggaggtggacggacttcgagccgacggacctcgagaagccgccgtttccggtgcacctgttccagggtgacgaggacggcgtcgtgcccgtgcagctgcagcggcacatatgcaataagctcggctgggtcagctaccacgagctccccggagctgggcacttcttgtcagcggtgccaggactcggcgacaggatcctcagcacgctcctgtcctcgccggcgtcggcgtgactgatccacgactcgcacctagcaagtactagactactagtacatgactgatgttgctgtagctatctctccaaagcattgctggtcgctgaagaaaagcactttatatgagcttagactatctctagcagatttattatcacatctcatatctcactctctatttcaaactccattgtacaaacagtacaatctacagtacaaaacaatatttttcccaacgttctggatatggccttagcccctactggtgttgtaccaagaaaccgacgagaaggcacttttatactccctccaatccaaaatagtagtcgttttagctctaaatcatactcaatatcgcatttcttatttcaaactagtctataaacagaa

SEQ ID NO: 5505 - DNA, 896 bp, Zea mays
  misc_feature (4)..(4): n is a, c, g, or t
  misc_feature (32)..(32): n is a, c, g, or t
  misc_feature (37)..(37): n is a, c, g, or t
  misc_feature (42)..(42): n is a, c, g, or t
ctanagttgattactggccgtagggctattgncagcnccagnccacatggagaacaaaatcttgtctcatgggcacgtcctctgtttaacgacagaagaaagctccctaagatggctgacccgaggctggaagggcgataccccatgcgtgggctttaccaagcccttgcagtggcttcgatgtgcattcagtcggaggctgcttcacgcccactgattgcagatgtcgtgactgctctgtcctacttggcatcccagccatatgatcccaacgcagctcttgcttcaaggaagccaggcggcgatcagcgaagcaagcctggcgagaacggcagggcagtttccaggaatgatgaaactggaagctccggccacaaaacacctgccaaggaccgagaggactcacccagggacctcccagcgatcctgaacaaggaccttgaccgggagcgcatggtggccgaggcgaagatgtggggcgaccgggagcgcatggtggccgaggctaagatgtggggcgaccgagagcgcatggtggctgaggcgaagatgtggggtgaaaattggcgtgacaagcggcgtgcagagattgggcaggggagcctggattcggttactgggaacagctagggggcaattaagcgaacagaaacgtgacatccacccatgcatttcgtttgtttatttccaggtccattttcgttctggcggcggtcggcaggccccagggttgtacatttctaggtcagggaagagtgggaaagcggcagcgttgtactggacagtgaatgcatgtggttgtacatgtaaattctcagaaaagttttgtgagaatgaaaggacatatttgagttccaaaaaaaaaaaaaaaaaaaaacaagagaaaaactcgagag

SEQ ID NO: 5506 - DNA, 2518 bp, Zea mays
cgccttggtttcaatgacgggacatgtcgacaggatggggtgggacgaccccttagataagattgtttggttcagggttaaaggttaagagttgagacatgactattccagcttgtcccctgttatccctcaaaattggagggacgagaggggacactgaaggatgtggatgccccggctgtccacagctgtcctgcaaccaaacatggatggttatttgtgtaactttcatgaatttgcaaatagaatatggggtcccaatacaacaacatagccttttgtcccaagcacaagcagggtagtctatttccatagaatggctaagtagaggttggctcgccaagcctaacacccccttcctcctttacgagggcttgggatttgctgctatgttgagacaagctcagcatagacggagttgggggatcctaatataaataagaatatgggagcttgagtgttgacaatagggacgctgttaattatccccttccaatggaagttggtagctatattttgtatgtattactccctcagttccaaattaaaattcgttttacctttttactagattcatacaataattaatgtatatgttatgtctaggtttatgatcatctatatgaatatggatataaaaatctagagctaaaacgactactattttgggacggagggagtattatgtaataatttgtcatattttttcctgacgagatgactaatctagtttgtctatgtttattttagtcaaacaagtgatagcggcggctatgctaccttggagacagagcaacctgggagcctaacgcccatgcttggggacaaaaaggttggcctgtgacccccctgttgtattctgtaattattactttgtttaatgagggacaatgacatatgtattcagagatctgatgttgactggtttttcggcagcccattattggcccggaaaagatgagagaggctcaatctcgtaatcaaacaccatacctcattttaagtggcaatgcaaaaacaggtcaaacaagtgatagcggcggctatgctaccttggagacagagcaacctgggagcctaacgcccatgcttggggacaaaaaggtcgagcattttttgggcatcaaacgaagtgccaagcctggaagcttacctcctccagtcccaaagaaaccgaagaactgaacctggtggtagcactcagccaacgaagcaggctacaacgcatttactgtgaacagcaatcagcccacaagcttccacggctcaaccccccgccgccgcactagaaatgcaatatcctctgtatttcttctaagctgattacactaacattctggcatgttcgatggggttttgtaattcagtgatatacgtgtgcatccttgatctgccttgaacatgtaagtgatggaactaaatattgttctaacgacacaccgtttccgtttgaataaagtgtagttatgatgtgacggtttaaggttaaagcagctgtgttcaagagctacattcgttctgaaaatatagacggggcgcctggaaccaaaaaaaaaaaacggttttagaccatctacttttttgatccaatttatatggaaatttgtcaatatttatgacatcaaattgatatattaaaaatgtatttcatgacgaatacaatgttactccatgcgttctaaaataaaattcgttttacctttttagtggtataataattaatatatttattttatatgtgtctaaatttatcattatctatttaaacgtaaacgtaaaaagtctaaagctaaaacaattaatattttagaatggattgagtatttgatatcataggtattcttttgagatcgtctcaaaataaaatttgttttatctttttagtgatttgtacaataattaatatatttgttttatatatgtgtctaaatttatcattatttatttgaaaaaatatatataaaagataaaacgattaatattttgagacggagtgagtatttgatatcataggtattcttttgagatgagcctgctgggagttgggtatttcacagccctagcagcggccagaactcaaaattctcacaaacgaagggaactcaagttccttgtgcgctgattagggcgggacgaatattcgtggcaacccaagttccttgtgcgctgattagggttggacggatattcgtggcacgttcttggttgggttggatcagctcgttttaattttttttttcataatctgagttaatatctaagctcagtttgttcacctttcagcaaaagaaaattctatacatatcatttatacatgaatcggtgaaatatgtacatgtatgtgtgttgcccgtaacatacgggtttaactgattattaatatgcttgataaactgtgtctatgttaaattggtctgtacaactgtgcatataggttaaactaacgaacatgtgtgccgatttgtgacgaactcataagtgatgaactgtgataatttgatgttgaattaatatggtc

SEQ ID NO: 5507 - DNA, 2853 bp, Zea mays
  misc_feature (1173)..(1173): n is a, c, g, or t
  misc_feature (2836)..(2837): n is a, c, g, or t
accggccggacctgcccggcgtgcccgaacagagcgcctcaccgcgccgcacgccgccgtcggtcgccgaccccagtcaccggtccacgcccgcctccccctttctcctccgccctttcttgtgaccgccgccgcgggccctagcccgccgttccctctccggcgccccgctcccgcacccgcaccggatcagtccgggccgcgtggtcgcccccacctaccgcctcgggtccactcgctcgcggttgcgtgtcccgcggggtggcccctcgggcctcggcagctccggtttcgaatggggctctcgtcggccgccactggcgacggggtgcagctctgcgtgttcgacctccagagggggcaacaggagggccaggagctcgacaagatcctctacttctaccccgccgactgccccatcctgctccagctctctgtcatcggcctctgcgaggggatcgtcactttcactaggttgccttcgctctcactcatttttattgtgcagttggtcgcaatttgaaggtcttgatctgctcgtgctcctcgccaacaacagcagcagcatcttctgcgtttaggaaaagaattgcacccagctttctagagggctacaacagcatctaagcttatagcatcacttcagtatttcaaatccgtagattgctcgagtatgcaagtttgggtgaatcgattttgttgcatgtgatccagcttaggttttttcaagcaagaacaattctggacttgattagtttttttggcagcgggccaatggcgttggttcctaagttcacctgtatgacagtggcagatctagaaacatctagccttttaatagtaataacatttgtaattttgtatagtggtttattttcacatagtgttcacagttcacatattcatgtagatctctagacaactgcaaatactaatggatgattactcagactgacatgggggttaacatcagtaattggggcccttcataagcaacatctcttttgtggtcacattatgacttccgtttgctctttgatagtgtattctccccaaattgccatccaagtatttcctgactctatacttttgataattcatttattgcctaatattgctgggttccacatcttatttctcaatgttagttatatgcagaattttttcccccgnaagaggattgcgaggttatagattcagagaaacactcccatgttttttaccaagccgaaacggatatttggatggttctggttgtggaaaaaaacaaggaaaatgaattgacttggcgttgtggtgcactacaagggattcttaaagaggctcattctctctttgcaatgtttcatggaccaatccgaactttgcttcacaaacaacccagtgcagagcttgctcgtggtcacctccgcacatttcttacagattatttgagcgattttaatgttggaaagaagttacaatttccaacctaccgtgacagcctaaaggagaggggaacagtccaaatgcttacggtatcacgagaagtggcacttgacgttcagtcactcgccacagtacttggatcatgtcttggaaatgttacctgccaatcacttgtactatttgaagacctcttggtgtcaacgacactgcccccggatgatactttaaacctatatacatatgctgttctgaggttaactccgcgtgctttatattccaatgcaagttcttggtcctatttgcggaaaggaacttctgttagtgctggccaaacatcaagttcatcaaatggaacaactgcaggagaaaggcctctcctacgtgagaaattgtcaaagggaaaggatggctttgttgctgctgatttcacagctacagaagctcgttgtgctgtaccctcgactccaatactttggttccagcaggcagatgagtgcatgcacctatgcatttatcagcacaaaagtctcactatcttactgctggttcctgcttcctcagtgataaatggagaagagggcattactcatgtgaagaaggcgatccttgaaaatgcatcacagaagattgtcactgttgagcagaaattgacacgaggatggggaggagaaaatgcgtatcatgttagtggatatcgttatttgcttgttgatccggagagaagagtatcaagagcctccccacctgggaaagtcaccaccctagcaaaggattctctacttgccctcaacatgctaagacaagaagtagatctagagaagtcaagatacaagagaggcgacccttgtcatgataaggatttcgaagtatgtatcagaacaaaaaacaatgcgtgggttattgctaaaatcagtcaaggaagggagctttacatggctctagagaagggtggtgaaacgcttctatatgcatccacagctgtagagaaattcagcaacaggtactgtgagggagcattctctacagattagaagcaccagagggagatcttagcttttccatacattacctattatgtacatcctgtttttttcccagctgtatcgttgccccctattgttgagagactcggaccactctttgcgaagggaataaggagttcgtatcagttgtacagctgctctgctgtcgtgtgctatctgcaaaagaatagcctagtctgggaataacgcagagcgggatagagtttgtttgttcacttatgcccttccttaacgcagagcattgtgcgtgttttcattttgctgtaacagccggcgatttacctgcagactgggaaagtaacttagcgtttaatttggtattctgaaaaaaaaaaaaggaaacccggtacccaaaaaaaaaaaannaaaaaaaaaaaaaaaa

SEQ ID NO: 5508 - DNA, 2219 bp, Zea mays
ctttctgctgaaggaaaccatattgtttgctggatctttaaaaaggggaaccgaattcccgagagcgagcagcagggaatctctgctgaatccgtaggctccgaattggagctggaagtgtagtgatttcctgattggggacataaggcggggtttgtccctactccccagtgagctccacgcggtccctgctcttcttccagtcaaaattctgtacccttcggtgctgggatcaaggaactaggcgtgttgtcttgaactcttgattcctgcttcatggaaattgtatatgtttttctctgaattcaaaatcttccctattctcccaaagctttctgagtgcaggaagaagggcggcggcccgctcctccactgtgaacatgggttggttgtgtccaatatttaatggtccagtaaatagagtttcaagaggacactacaacgggaactcccatgaaggctattcaactcagcacactaaatcatatggtgtgcatggcaatgaggacgaagacatggatcatgctattgcattatccttatcagaggaagatcaaaggaagggaaaggccattgataccgggcatcatttagatgaagatgaacagattgcacaggctctgcaagaaaatattggtcataacctagctgaagatgaacagcttgcacgggctctgcaagaaagtatgaatgatggacctcctcgtcagcacattccagttgaagatgttaactcagaaagtactccagcaagcatcttgccctcaaatattttccgcacaagtggcttgagggtttgtgctggatgcagaagtccaattggccgcggtcggtttctcagttgtatggactctgtttggcatcccgagtgcttcaggtgttatgcttgtgatagaccaatatcagagtatgagtttgctgttcatgaaaaccatgcctaccacaggccctgctacaaggagcgtttccatcctaaatgtgatgtttgcagtagctttattcccacagataaaaatggcctcattgaataccgggcccatcctttctggatgcagaagtattgtccttcccctgaaaatgatggtacacctaggtgctgcagttgtgaacgaatggagccaaaggacagtcaatacataacattagatgatggccggagactctgcttggagtgtctgcatactgctattatggagaccaatgaatgccagccactgtacattgatattcaagaattttatgagggtatgaacatgaaagtagagcaacaagttcccttgcttttggttgagcgacaagctttaaatgaagccatggaagcagagaaatctgtgcaccaccttcctgaaacaagaggcctctgcctatctgaggagcagattgtcagaactatattgaaaggaccaattggaccaggcaacagaatcatagatatggtcacaggaccatacaaactcattagacggtgtgaagtgactgcaattcttatactgtacgggctgccaaggctgctaactggctcgattctggctcatgagatgatgcatgcttacctccgacttaaaggataccgaaccctgagtccagaggttgaagaaggcatctgtcaggttctagctcatctttggcttgagtcagaaatcacatcaggttctggtagcatgtcaaccacctcagatgcgtcatcgtcatcttcaacatcttcatcatcgaaaaagggcgcaaagacggaatttgaaaaaagacttggggagttcttcaagtaccaaattgaaacagattcttctgtcgcttatggagatgggtttcgagcaggcatgcgagccattgagcggtacggcttgagaagcacccttgatcatatcaagatgacggggtcttttccatgctgaagctggttttttttacctcggtttggatatgggtatacatattttttttggagaacttttggttcaggttatacatacgaaaagccgaacttctgtgtcgagaagaggcataaggatttagctatactgtccattgcaggaaaaaactgtttcccttttcaattataaaatttcacagtgcagacatgaaggtatgtggtctttagcttggccaaccttgtggaatgctgtcacagtgtcacttgatgcaaaagaaaattcgaatacatatgctttgctgtgcttgaaatgcaatggttggatgctatgctcttctttattgcgttc

SEQ ID NO: 5509 - DNA, 2437 bp, Zea mays
cgccgcgtcgtaagctcggaattcggctcgaggcgccgtgacgacgttagttaatcgtgctcactggtgctggaggcaagttctggggtgcctcggggcccgccgggttccctaacgttcatcagactggggatgtatcacttatgccggacgtatccgtcgagcttgtgtcaaacatgatggaagagggaaaaaaaccttctgttgcagccattcaaggtcttgcattgggtggtggcctagagttgactatgggttgtcatgctcggatatctactcctgaagctcaacttggattgccagagctaacccttggcatcatccctggatttggaggtacccagcgtttgccgaggcttgtaggtctacccaaagcaattgaaatgatgctgcaaagtaagttcattacggcaaaggaagggaaggaacgtggtttgattgatgccctttgctctcctgatgaattgataaagacatcacgtctttgggctctggaaattgctaattgccgtaaaccttggatgaggtctcttggcagaacagataggcttggaccactctctgaagctcgtgctgtgttaaatgcagcaagacagcaagcaatgaagatcgcaccaaacatgccacaaaaccaggcctgcctggatgtgatggaggaaggcatattatgtggaggccaagctggtgttttgaaggaggccatggttttcaaggagctggtgatagcaccaacatcaaaggctcttgtccatgttttctttgcacaacgttccacgacaaaggtgccaggtgtaactgatgttcaactgaaaccaaggccaattagaaaagttgctgttattggtggtggtctgatgggatctggaattgccacatcacttcttgttagcaacatttctgttgtgctcaaggaagtaaaccctcagtttctgcaaaggggagagaaaacaatagcaggtaatcttgagggcctggtcaaaagaggttcactaacaaaggataggatgcacaaggccatggcccttctcaagggtgctttggattattcagatttcaaggatgttgatatggttattgaggctgttattgagaagattcctttgaagcaatcaatatttgctgacattgagaaaatctgtccaaaacattgcatacttgcaacaaacacatccaccattgatttgaatgttgttggcaagaagacaaattctcaagatagaattataggggctcactttttcagccctgctcatattatgcccttgcttgaaattgttcggacggagaagacatcaccacaagctatccttgatctcatcaccattgggaagataataaagaaagtccctattgtggtcggcaactgcacaggatttgcagtcaaccgtacattttttccttacacacagggttctcatcttctagttagtcttggtattgatgttttcagaattgatcgagtaataagcacctttggcatgccaatgggaccttttcaactccaagatgtggctgggtatggagttgccttggcagtaaaggatatctacgctgatgcctttggagaaagaaatttggactctgaccttgtggatttgatggtaaaggatggacgacaaggaaaggtgaacggcaaaggttactacatttatgagaagggtgggaagccaaagccagatcctagtgttaagcatgttatcgaggagtaccgaaagcacgcaaacacaatgcctggtggaaagcctgttactttaacggatcaagatattttggagatgattttcttcccagttgtgaatgaggcatgcagggttatggatgaaaatgttgtaattcgagcttctgatcttgatattgcttctgttcttggaatgggctttcctaaatacaggggtggtcttgtcttctgggctgacactgttggagcaccttacatacattctaagctaagcaagtgggctgaaatttatggccccttcttcaaaccatcatcatatttggaacagcgagctaagagtggtgtaccattgagcgcaccaggagcttcgcagcaaggttcggcgaggtcacgcatgtgaggtgctgtccagcattgagcagaataatgcagaatacttgcgggatgagccattgacggctgcttcgctgatcaaaacacctccgtgaacacaaacatgaggcacagaagaaatgatgaaaaataaagggattgtaacagttttggtgcctttgactgtaactggcagagtttctggggacagagtggcatggattaattgcacctgatcactctgtatgtcgctgtcatgtgtgcaatgttcaatacgtacgtaataaagaatggaaatatatgccgcaaaaaaaaaaaaaaaaaaaacaaaaaccaaaaaaaaataaaataaaaaaaaaaaaagtactctgcgttgttaccactgct

SEQ ID NO: 5510 - DNA, 2997 bp, Zea mays
  misc_feature (68)..(68): n is a, c, g, or t
cgcgcgcgcccgcgcgggcgcgggggggcggggcggggccgggggggggggggggggggggggggggngggggtgggggggggccgggggggggggggggggctggctaggcccccccccccccccccccccccggaaaagatcccctgcagaggacatgagaaacggcgttgcagattccaaaacccatcagaaaacttctgtcttttctggacaaaaggttcgtgaagttttccaattaaaacgcggaacatattcagatcttactgctgccaagatttcagagatgatgcactctaatagcttagataatgcaccgacacagtcgcttattagtgttgttaatggtattttggatgaaagcatagaaaggaaaaagggagaaataccacatcgtgtagtttacttactgcggaaagtcgttcaagagattgagcaccgtctctgtattcaagcagagcacataagaagtcaaaatgttaccatcaagacaagagaacaaaagtactgttcaaaaattaaagcacttgaaatgttggtaaatggcacaaatgaagaaaaccagatggcaataaacaggcttcagatagtcaagaatgagaagtcacaaatcgaagagaaaaaagaactctgtgagaaagatgttcaacgattaatgaaagagaaagaatattccaaaagcatcataatgaacctaacaaaagatatggaagccatgaatagattgcatgagcagcaacttgagcaaattggaagaaaggcaaaggaaatggaggaacaattaaccaccagggtaaaagaagtagagtatctcttgctacaatcgaataagaaagttgaagaacttgagattgcttctaagctaaaatcacagttatgggatcagaaagagaacatttttcagagttacatggataatcaacaattagttatcaaggacataagaatattgtcacagtcatatgaaaatgatatgtatgcacttcaaatgcagtggagaaatgaaatctctaacttaggatctgggttaaaatgtttggttgatgccgctgaaaattatcataaagtcctgacagagaaccaaaagttatttaatgaagtgcaagaactaaaaggtaatataagagtatattgtcgtgttaggccatttctttccggtcaagataaaaagtccaccacaattgactacatgggggaaaatggtgagcttcttatatcaaatccatttaagcaagggaaggacggacatagaatgttcaagtttaataaagtgtttactccatttgcttcccaagctgaggttttttctgacatacaaccactgatccgatcagttctggatggattcaacgtttgtatttttgcatatggccagactggttctggcaaaacttacactatgagtgggcctaccacatcaaaacaagattggggtgtcaattatcgagctttaaatgatttgtttgatatttcactaagtaggagaaatgccttctcatatgaggtgggggtacaaatggttgagatatacaatgaacaagtccgtgatctgctatcaaatgatattgcacaaagaagacttgggatttggaacacttctcaacccaatgggcttgttgttccagatgcaagcttgcactcagttaagtcgacatctgatgtattagacttgatggagattggacaagcaaatagagcagttggttcaacagcgctaaatgaacgaagtagtcggtcacacagtattctaactgtacatgttcgagggatggatttgaagaatggatcaacctctaggggttgtttgcatcttattgatcttgctggtagtgagagggtagagaagtctgaagtaaccggcgatagattaaaagaagctcaatacattaacaaatcactctctgcgttaggtgatgttatttttgctttgtcacagaaaagtgcccatgtgccttatagaaacagcaagttaacacaagttcttcaaagttctttaggtggacaagcaaaaactctaatgtttgttcagataaatcctgatgttgagtcatattcagaaactataagtactttaaagtttgctgaaagggtgtctggagtagagttaggtgctgctagaagtaacaaggagggaaaagatataaaagagctattggaacaggttgcgtctttgaaagacacaattttgcgcaaagatatggaaatagagcagatccaggtcatcaaagacaaagtaaaatccccaaatttgttgttagatagaaatgtgcctggcttgacgaagactacagcaaaccaacctagccaactattatcaggcgaacgaatgcttaagtctagtgacagagttctatcggatcgtcagagttacggcgaggtgaatgtagatcctaaccaccatgtgatggatactgcaccagtgagcatagatgaagcaggatatgagaacaatgcatcggatgatggtttatcgggtgaaaccgagaatgataattcagctgctgagatgacagcggaacggctgcatagatttccatcaagaataagcaggttcactctcacaaagaacgggcagccatctatgtctagatcgaacccaaaggatgctaagactccaagcaatacgaaagctccatcgagccggttgacaggaggctcttcagccaggtctaaaagacggcagtagagcacgatcatgttgctcgttttgatgtgcattgtagttgaaatgtgaatttgatgggtagttgtaggaccgttttatgattgtaactttagaaaatgtcagacactgatggcagaatatttgagacatttgtttgatcatttgcttatgccgagcaaaacagcaaacaatgctcgattgtatgtgaaacactctgacctgtgaccatttgaatgtcggtgcgcctccggaagtccggagttgtgtatataccaccaaattaccggcctaaaaaaaaaaaaaaaaaacctcgagggggggcccggtaccca

SEQ ID NO: 5511 - DNA, 2102 bp, Zea mays
tttccccaactggggaaagggggatttttcaaaggcgataaattgggaacgccgggttttccagtcccgccgtttaaaacggcgcccaggaatgtaattccggcccctataggggccgattgggtaccgggccccccctcgagtttttttttttttttttttttgcgtgaaattgcatggcacagttattttctgacgccatcagcggcacagcacatgacaagatagtttaaagacctcaacaggttaaggtcagtatcataattccatgaccaggtaatgagcttcccctgctgctcatattgagctgcacaagtgcagcacaagatatggccgcatatttacactacaaaggtgcagctttgctaacagtaagttgtccactaatagtcaaatctgctcagtgcattacaaagccttgtttcactaatagtctgacaaaagtcgttgttcctgccagggatctgcacgaaccagaaaccatcaggaataagcatcgctgtctgagaaatatggcacaggcttcagactgaatgtttggcatagcctgtgatacagcctacagcttcagcacgagaccaaggggactgtgatcactggcagagatgtccggaagaatatatgaatcatgcactttttctgcgattgattcggacacaagaaagtaatccaggcgccaacctttgtttgtcttccgggcattatgtctgtacccccagtaactataggcaacaacattaggatgctgtttccgaaacgtatcaacgaaccctttggacaaaaaattggtcccaaatgattctctttcctcgtttgtgaagccagcacttctacgatttccagcagggtcatgtatatcaatctcctgatgcgcacaattaagatcaccggttagtatgacaggcttcgatttctccaattctttcatgtagttaccaagggatggatcccactctgtgaccctgtaagtcaatctttttagaccatcaccagagtttggtacataagcagttaacaggtagaagtcatcaaactctacagtcacaaccctcccttcagtatcatggtctgatataccaagcccatacttgatcgacagtggtttgactcttgaaattattgcagtgccagaatagccaagctttgacacactgcaagtccagaaactatttgtgtagccatcaagcaaagtgtccttaataacttcaatatccttctcctgcatttttgtttcttgtaagcaaagcacatcaaagtcctccctctgtgctaactgctgcacagagaagcctcttgatttgagcaatgctttcaatccattgacattccatgacataatcttcagagcccgtgtatccttgctaagaggtggaggcctcatagtcctagggttgtatggaatccagctggcttgtggtttcttatgcacgagtatagtccaaggctctgaatcatcatcaggacttaatccggcaactgtttccttctggacaacagtcttacttagcttgacattagtcaccgaaatttcctgacaagtggtgttcttgcttgatttttgttttgttctacttcttttcttgttaggtgtttcagaaataatctcagaactttctagtttttgttcaaccacaacagaagcaccaccttttcttttcaaaggtacttccaaggggctaaccagctcaacggatgactttccctcttcaccatttgcttccacggccatagaattcatcagtgctgatactaaatctttcttggtacctttcacagaaatacccctcctcctcgtgagctccctgagctccttgacagtcattgattggagctggctagggctgctgctcctccctcgctccatctccaaatcactttcagcagcatcttccttctctgtgagtggctgctcatctttcttgacctcactgttcttagaggcagctctacgtgaatatgtggcccgcattccgtccctcatggcgttgagattcactagtaccgttactcttgaactaaatttcacacttgagagcccactggtacactggcagaggcggaggagggaggcgccgcgcagcagcagcggcatcggtcgccgt

SEQ ID NO: 5512 - DNA, 1241 bp, Zea mays
tccgcccacgcgtccgcccacgcgtccggtcaacggtctcgagctacgcttctgccagcagtgcagcaggttccacaacctggccgaatttgaccagcaaaagaaaagctgtcgcaagcgtctagcaggccacaacgaacgccggagacggccacctcctggaccccttgcgtcacgatatggccgtctcgctgcaccgctcggtgaagagcccggcggcaggttcagaagcttcatgctggatttctcatacccaagggttccaagcgccatgagggatgggtttccagcggttcgacctggtggtgaaagggtgcctggcagcagtatccagtggcaagcagcgagcctagatcctcctccccctcaccatcagagcgcggcagcaggatacggtgcccactcgtacgggagcccgggtagctcgtcgtcgtcgtcgaggccaccggtgttccctgctggcccggagctccccccaggcggtggatgtctcgcaggagtccccacggactctagctgtgctctctctcttctgtcaactcagccatgggacgctgctggccacagcgccggccacggccacggccacggccacgccgcgtcactgcccgcaacagcaggcttcgacggcaaccccgtggccatggcgagtagctacatcgcgccgccaagcccctggaccgactcccgggcccacgaaggcgggcggcggaacgtgcctcaactgccacccgacgtccccctcggctacgtgcactctggcccaggcacccatcacggccagttctcaggtgagctcgagcttgccctgcagggaaacaggccagccccggcgccgcgcaatggccagggctccgcgggcgcgttcgaccaggccggcagcacgacggagtggtcgctctaggaggccaaataaaagcgcggcacatcgtcgtagccgcacagcgagatggagctggaagcctggctccgctagctagctgcatgcgctgtttgcttgcctagaggctagagcatccagtatgataataagcgaggaactagtgcagtgccggccaggagactgatttcttttgcgcttgtccatgaactcgtctgttgcgtctatgtacacctccatggtttgaactcgtcggggactttgctcgatgtgttgttattaatctcatgctcatccttccgctaatgttgcctggcggcatcgccaggaatcggttccaaggctaaaaaaaaaaagaaaa

SEQ ID NO: 5513 - DNA, 1007 bp, Zea mays
ttcggcacgagatcccttccttcactggcccgccgcggtcccgggaaaagtcagtcaactcagccaacaagcgctgctgctcgggcacgggtggtttgggaggccggacgcaacgtcgggatgcagtcgctgcaggacaaggcgtcggagtggagcggggtggcggccgccgatgcctttgccatcgacgacgtcaacatattcgagtccctcggcggcactccgcagccattcgtcgacctctccaccaatttctacaccagggtttatgaggacgaggaggagtggtttcgggagatattcggggggtccaagaaggaggatgccatccagaaccagtatgagttcctgatccagcgcatgggcggcccgcctctattctcccagaggagaggacaccctgcccttataggacgacaccgaccattcttggttacccaccgagctgcagagcggtggctacaccacatgcaacaagctttggacgcaactgaaagcatagatgtggactcaaaaacgaaaatgatgaacttctttaggcacactgcttacttccttgttgctggcaatgagatgacaaggcaacagggccatggagtagcctgcaaacatgcaacaagtaaaccagctgagtaaccattttagccgtggagctggtaaccattggaataattactgataagccttttatccagtgtgcctttatagcattccgtatacaatggagttgaaacaacctccacattcaaagaaacaatggcactgactctttgtaggctttatagccattcttgagcagagagtgtactcaaagtggatagttgtagcttctgccaatatgtttatccttcttcgtctcttgtgctcaagagttattcacagcagtttttcaaatttgacctcaccctagcaaggttaccacaccacatgttaaccatgccacacttatttaaggtcatatttgcttaattttcataagtttgggagccaaaaaaaaaaaaaaaaaa

SEQ ID NO: 5514 - DNA, 3826 bp, Zea mays
  misc_feature (591)..(591): n is a, c, g, or t
gatccccctgctgtagctgctctatcctctgtgctgactgctgagcaatctggatcttcagaatttctacgatccaaagctagcaacacagcatataagactggtagagctgcaccttccttttcaatttatcattcattaaagaatagcttggcaaatgtagggggcgaaggttcttactttctttggattctcaaatatgtattcttttccagtttatcattatttaggcattttgggttctctgatctgtattcctcgtttctctgaaatgtttttgtattgtctttgcaaattttagccctagaagtctatagtcatgtttatttgattttgttggtacacctttgccttttttatagttatgactaatgggatgcacatagatgaaggccactaccactttgctggcccatttatcgcttcaaagtttgacaccttggatcaatgcagatgtcgaccggattgtcataactccagctggcccatcaggcccatcttctcctcagtctgaagctggggagtccaatgtgtttcaccaggaaaaagatgctgcagcagatggggcaccgcctgacactgatggagcantggctgaggccggagaggaagaaacaacggaaaatgttggtgaagcgacatttagctatgaccgcttgatatccaaatccaccgatccagttcgtgggatagattacaaacgcagagaggtttgtgcctgcacccgtccccccagcatccttgaagtggtgaattttctctagtgagtagttatggagttttttttcttggttccttgtacccggaagtaaccacagcctttcgcctgcagctaaatcacttgcttctcttgtattgatgcatttggttccattggttctctttagacgactccttatcacatttgtccacacatatattcttttgttgctcgtttggccaagtatattcatgttgggagttaggcttacattgaaccttgctgggccaatcttgctgatccagttcgtgggattgattacaaacgcagagaggcatacttatcagatagtgaattccaaactgtttttggcatgaccaaggatgcattctaccgacagccaaattggaagcaagaactacagaagcgaaaagcagatcttttctaaagagaacaagccttgttaccagtggtctgctacagtatgcaatcctcttgtcgtgaatggtcggtcccatgagagttggtgtattaatatattgttggtcgtttctgaggacggtctactggtggctttgcacggttgtttcttttttggcaaccaattttataggtcaattcttttatttgtatatggcctgggttgtgctgcttgcgaggtcctaaaatgcttctttgttcttctttgtgaatgtccatatgtgtatatcattttctactcgccagtttgttacgtacgggcatttcctggcaggttcgtcattgcattgtcatctatatgtcttgcacacgaaatatttgtgctgtccgttttgctgttaatggttggcagttgtttgggatttgaacacttggctgaattccatcattttcgtgtggctgttggcgcatgcttgtcatttctaaatagaaaattagatttgtctagtgtctggatcagcagttgtagaaagtggaattagaccagattatgctcattgttatctcatgttttttatcacaaacaaacacgatcattctactggtaagcggttatttcatgtaccgcctggagccctggacacggcattcctgcccaccggcagtccggcatcagctcgagcacgtgcaagtgcgaggagacggccgggccaaaggccggggcggcggcgcgggaaccaggcggaggcggcagtactcatagcagaaccatacgaaaaagaagaaaaatccttcggattgtaatagaattttggattggggtttaaagtcgggtctataatacactatagtttagtttcctctgtcccaatttataattcgtttcactttttaatcttaagtttaatcactcgtcttattcaaaaagttgtgagaaagatttcattgtggttttatttattatcaaatatactttacaacatagattaacttttttttttcatttttttatgaatttttttaaataagatgagtggttaaacttaaggttaaaaaagtcaacgaagtatattttaaaactgagggggtagtatttatagtagacagatataagaacattgtatccaaaaacgaggtggagtgagataaacatagctgtatcagttctccgacgaacaggcaaacagcagctgcaatccccaactggcatcagatcaagtccactgtcttcttccatgccagtgcaaggctgcaagccccccgcgcccagccaatcgattaacataaaagataaaaaccaaactaagcaagcaaattggctcaaagatttaccaacgtagaaatctccagaggatcacaacaacccgataagcgtgcgtgatcagcagctgctggtgcagaatatgatgaaggcacatctactctctaccagcaactgatcatcaggtgaggtgacctagaggccgaggcactgcattgctggtgacgcaggtggaaaatggctggcggcagagaaggccaacggtaacgtccgagatctcctgagttgtagtttcatatctgaaatccaagatgaatatgctgctccaaatctaattcttttgagttgagtttgttccaaacagtctctaaataagttggatcttaccctgagttaagagcatatccaacagctcttaattgatttagctatcaatatcttagattagtacctctctgacaatatttgagatgtaaacaaagactattctccaacagccttttaaagatcccctgaataagaagttaactcccgtcttgcatggtgcacgcaattgaaatggcgcatgctcagctgcacctatggatgacaatccaaatgtttctttgggctcaattttaattaaaaaacgaatagaaataaagtctgaccctaatccttgaactgcacccgcgcatgcaccacaccaacgccgtccacctcgcatcgggcgcatgcagcaactaaaacggcgcacatctctttcctaacatgcatgggaaatggaaaaaaaaaatagataggggcgaccatggttggcctcaaatctgtacgtggaggctttggtttaagagcgtccaataatttagagcacggatactgagtttttatacttttatactcttaaactattgttttgggaatagtaattagaagcagctggagttgctcccaataaaaagtctaatgcggactacataacaatgaacgtgacactttggtaccaaatttaattaattaactgttttttggcaaaagtgtaacgtgacagtatggttgttgataccgcgtcttcactaccaggtaagtgtcggatctcagcaattagcatgcgtgcgatcctggcaattagctggccgtcgtacggccgcgttaggcggaagacatgcacgtccgggaaattaggtgcatggctaattgtgttcttttttttgtcggtgcaaaaatgtcaaacgctgtcatatcatgcatgcatcgtcccgtgcacgcaattatacatctaggctttagtttggccgcaaattagcccagggaagatttccctccacgtagttgagaacccaagtcctgtcatttctcaggataataatctcaagaaatatcatttgaataagatatttagttatttaggacttgtcggggatcataattaggggtaccctcaagacgcctaattctcaggggta

SEQ ID NO: 5515 - DNA, 2036 bp, Zea mays
gggaccctcgagtgggcccccgcggggcggcccggccggaattccgtccacagaagaagaatccttctcgacgccgcccccattcattcttggagggcaagaagaacgcgcagtccaaaagcgaaacaaggggaaggggcgaggcagccaaacgaatcccagcacctgcctctcctttgcttgcgcagatctagcgatggcggcgggcggtgagttggcgtggggggaggagcccgtggcgcggcgccggcctaagaccaagatcgtctgcacgctcggcccggcgtcgcgatccgtcgagatgatctcgcgcctgctgcgcgccgggatgtgcgtcgcgcgcttcaacttctcccatggctcccacgagtaccaccaggagacgctcgacaacctgcacgccgccatggagctcaccgggatcctctgcgccgttatgctcgacaccaagggtccagagattagaactggatttttgaaagatgggaagcctattcaattgataaaaggccaagaaatcacaatttctacagactatagcattcagggtgatgagaaaatgatatcaatgagctacaagaagcttgctgttgatctgaagccaggcagtgtcatattgtgtgctgatggtaccatcactcttactgttcttcactgtgataaagaacaaggcttggttcgctgccgctgtgagaacactttcaagcttggcgagaggaagaatgttaatcttccaggagttattgttgatctccccacactcacagacaaggacaaggaggacatccttaaatggggtgttccaaacaagattgacatgattgccttgtcatttgttcggaagggttcggatcttgtggaggttaggaaggtacttggtgagcatgccaagtccataatgctgatgtcaaaggttgagaatcaagagggagtagctaactttgatgatatcctggcaaactctgatgcttttatggtggcaagaggtgatttaggaatggaaattcctatagagaagattttctttgcacagaaggtgatgattttcaagtgcaatattcaaggcaagcctgttgtgactgcaacccagatgttggaatctatgatcaagtctcctcgccctactcgggcagaagcaacggatgttgcaaacgcagttcttgatggcacagactgtgttatgctcagtggtgagactgctgctggggcttatccagagttggcggtgcagactatggctaagatctgcctgcaagcagagtcttgcgtagaccatgctgctattttcaaatcaatcatggcttcagctccaattccaatgagtccattggagagccttgcatcatcagctgttcgcacagcaaactctgccagggcagcacttatcttggtcctgaccaggggaggaactactgctaggcttgtagccaagtataggccatccatgccgattctgtccgttgtggttcctgagctgaagacagactcgttcgactgggcctgcagtgacgagggtccggcaaggcacagcctcattgtgaggggtgtcatcccaatgctgagtgccgccactgccaaggcctttgacaacgaagccactgacgaagctattggttttgccattgaaaatgcgaagacgatggggctatgcaacaccgatcaatccgttgtggccctgcaccgcatcgggatttcatccgtcatcaagcttcttactgtgaagtaggggtccaagggtgagggacaccattttgcttggtgaatttttgtgaggctgcttacgcacatcagcgtatccacagcttttctgttgccaaagatacagactttgcgttctggtacaccttggtgttacaaggttgtgggaatttgtcgtttagatattagcgatttaaacagtttatcaactgctatagctaattaatttgcagctgtgctgcaactttatcgtactgaaaattttatgtttgtttcacaaaaaaaaaaaaaaaaaacccctaaaaaaaagtaaaaaaaaaaaaaaaaaaaaaaaaaaa

SEQ ID NO: 5516 - DNA, 3828 bp, Zea mays
aaggaatatactctcagcttcgatttacctcacattcacatataatccatgccatttgagcttctgtttcccttcacaataatataatggattatcctctgtatactaactctaatctgctgggaaacatatgattggcattgttactggtatactccagtcacgtggtcgacaagagggcatctctgattgtgcggcaaataatataaatatcatatctacgctttagataggaatggtgaatgttggtgggaaaatggatgacaagattgataggtgtgtagctccatgtacaacaacgtgaatgaattgtgcattgggtcaagtgtcaaattgttgacttgatgctttcatacttatatatgcattttttgtccaaaacaatgcttccaatggtaaacaactaaactggggggggggggttatatattgtattatgctttctcttttgcagtaaaaaggaatcttgttcataccctgtccagaatagtcttcacttaaataagattcactaaatgggtttatcaatatcttacaggtggtatttacttgactttgaacatggttcaatcatggatgattattgtggaggaaggtctggatacaactcagaattactgaagatcatggaagctaaccaatctccccctcgcaagcgaccgcggagagatcgaaaccgtgaaaaggcaccctcctcaaacaagactgaagtattgcaacaagagatctggagagattttcctgaagatctttttgaaactgtcattgcaaggcttccagttgctgcaatttttcgattccgcactgtctgccgaaagtggtcttctcttttgggctcagacagtttctctcatcagtactctgaagctccacgtgggctgccatggttctatacaatcacccatgagaacgcgaacaacaatgttgcaatgtatgatccttcgctgaagaaatggcaccacccatccgttcctctcactcctacaaagatagttattccagtggcatctgtgggtggccttgtatgtttattggatctgagccacaagaatttctacatttgcaaccctcttatgcaatcactcaaggagatcccaccaagatcagtccagggatggtcaagagtcgctgtagggatggtgttgaatggaagaagttctagtgatggctacaaagttatgtggtttggaaatgatgggacttttgaagtctatgactctacaaagaacatgtggtctcgccctggaacttttcctccaagcatcaaacttccacttgctctaaatttcaggtcacagcctgtggcggttggcagcacggtatacttcatgtgtgcagaaccagatggtgttttgtcatatgatgtaagcactgggatttggaggcaatttgccatcccactgccaccgcatctgaccgaccacacacttgccgagttccagggaagggttatgctggtgggtctgctgtgcaaaaatgcagcgacctgtgtctgcatttgggagttgcagaagatgactctcctctggaaggaggtggacagaatgccaaatatctggtgcttagagttctacggtaagcacatgaagatgacatgcctgggcaacagtggtttgctcatgctctccttgaaggcgaagcgtatgaaccgccttgttacatacaaccttctgaaaagggagtggcaaaaggttcctgattgcgtgctaccatacagccgcaaaaagcaatggatagcgtgtggcacagcatttgatccggtcccctgcgccttggcctgacatggaatttaccttctttgcccgagtaccataatactatagtgaattcgtatcattggcctatatttttagatctttctaatgttatgatgagctctgcaaaaccgcgttcactgtggtttgttttctatcacgctgacgcatttgaaccgtttcctttgatcacctgctgctacttgggtcactgctacatcaattgggcaagtcgacctgaatatgtttcattgaagtaaaaaacggaacgccaggtgtctgtatttggtcttggttttggtatgtaccgtcaacttgtaatctttctgaacttgcagtttcctgtccagaaccgagtttattatacaataaagaccgggatgttgacgttttgaatcggctgcatggagaggctccttcgtcctattaccatgaaaacacatgtacatgtacttctgtttcaggctgcctactatttatcaatttatgtgcctacttttgatgcctgaactatttgcttcaacttcgtatgattttaggcattctgaaacctacactagctcttccaggcattctgagatctacactagctcccgtgtcgaagtttaggtttcttatctatggtatcttaggatgcatatggtcgttttttttattacaaatgacacaaaatgaagtttaaaataggagatgagataagtaaggctgctagagatagcttgttatttattgagtgaaatttaaaataggagatgtgacgtggaagactgctggagatagtcttatatgtaatgtagatgcaacaaaatataggtatcatgcaaaaagatgcaacaaaatacaggtatcatgcaaaaaaacggacattgcaaaaaaaaaaaaaaagagtggctaatgtccagatctcttgtatcagcatcacgcagaaaaacagatatcgtcaggcatcttagaacacaaccacaagcagaaaaccaggcatcgacacacagggaagacaccctcggcaaacacaacttcactgcctgccgattctcatgaaactgccatttgcaaggcgtccagtactccagttcactgcctgccgaaagtggtctggtcttcggatttgggctcggacagtttccctcgtcagtactctgaagcccaacccgctcctggagcacagcacatgacagagatttcattcagaacaaaacgtactggtacactgggggatggttctataacatctcataggaggcaacctcaagtagtcaagtgccttgcagtttctatcacatcccttctctccgcctttcaaatcgacactgaagatgcctcgacagatggatcaccagattaagtgatcaactacacgaatgatggcgaattattgttacaaatgtacaaacatagcttaggccgttccagactagcagagataccacctctccagcattgtagtaccaacacgatcagttcagcagtgagaatgggaggtctctcatctgcacaagttactatgagcattcatcatattaatttgtttgagatcgcagcaggaaaatttgaatccatcaaccatccagaaagtgtaagtacttgaatacaagctgggtccaaaaaaaaaacctaaacatggtttctaacctgtggtacccattcttcagaacagccaatccgatcctctgatttgttcttttctcataacgagagaatgcctcgctcgtcatcggcatgccttttcttcttatctttcttaccagacgcttcggtttgcactgcaacatcctcaccatccgcgtcagatttcttctttttcttcttctttctcaccttctgaggcagccacagcaggctcctcgccctccttggacttctttttccttttcttctcaccatcagcttcagcagcaggactctcgtcgctttccttggacttctttttcttcttcttccgatcctcctgaccgccatcctcttcaggctctgctgatggtgcaaattcggcctcatgatgtttcctcttctttgaaagccaattctgacttgtttggtatttcttcggtggattgtccaagcaccagatcag

SEQ ID NO: 5517 - DNA, 2476 bp, Zea mays
gggcgccccgcgccccccgaccaaagccgggcatacgcccccaagtccaaaagccctctccgccccgctctcccactcgtaggtgttctccccgtctccgcccgcactcgctcgtccgcgcgcaggaaggttgacctgtcgagggccggcgagcccggtaagtaagagtgaaaatggatggaagtagtaaagggagtgggcattctgaagcattaaggaactacaacctgggaagaactttaggtatcggtacatttggaaaagtgaagattgcagagcataagcttactggacatagggttgctataaagatcatcaactgccgccaaatgagaaatatggaaatggaagagaaagcaaagagagaattcaagatattgaagttgttcattcacccccatatcattcggctttatgaggtcatatacacacctacagatatatatgttgtgatggaatattgtaagtatggcgagttatttgattacattgttgagaaaggcagattacaggaagatgaagctcgtcgaatcttccagcagatcatatctggcgtcgaatactgccatagaaacatggttgtccaccgtgacctaaagccggaaaacttgttacttgattcaaagtataatgtaaaacttgcggattttggtctgagcaatgtcatgcatgatggccattttctgaagactagctgtgggagtccgaactatgctgctccagaggtaatatctggtaaactatatgctggacctgaggtcgatgtatggagttgtggggtgattctttatgctcttctttgtggaactcttccatttgatgatgagaatattcccaatctgttcaaaaaaattaagggaggtatctacacacttccaagtcatttgtctgctttggccagggatttgatcccacgaatgcttgttgttgagcctatgaagagaatcacaattagggaaattcgggagcatcaatggttccagattcgccttccacgttacttggcagtgcctccaccagatacgacacaacaagccaaaatgattgatgaagatacacttcgagatgttgttaatatgggatttaacaagaaccatgtgtgtgaatcactgtgcagcagacttcaaaatgaggcaactgttgcatattatttactattggacaatcggtttagagcaactagtggctatcttggggcagattatcaagaatcaatggacaggaatttaaatcagctggcgtcatctgaatcatctagttctggtacgaggaattatgttccaggaagcagtgatcctcatagcagtggtttgcggccatattatcctgttgaaagaaaatgggcgcttggacttcagtctcgggcccaccctcgtgaaataatggttgaggtcttaaaagcacttcaagaattaaacgtcagatggaagaagaatgggcactacaacgtgaaatgcagatggtgcccagggtttcctgaagttaatgacacgttagatgccagcaacagctttcttggtgactctaccatcatggataatgatgatgcaaatgggaggctacctactgtgatcaagtttgaattccagctttacaagacgaaggacgacaagtacctcctagatatgcagagagttactggacctcagctgctcttccttgacttctgtgcggccttccttaccaagcttagggttctatagtggtctaccatgtgcaaattttcactgtggtgatgaataaccgaaagcatgtaaataggaaccttgttctcgtattttggacaacgaacatgtttgagtgactggtcttgtgttgagcgcctaaaggtcatgtatacttaggttagtactatttccgttcttaaatatttgtcgcctgctagtgatagttcatttttgaactaatacgttacgaataaaaaaagagtatattactgtctgcatggacatggctgtttcagtaggccgtggcaccgcagatggcgatgctcactgcaacctattatgaaaaaaaatgccagaggccgcccgccgtctacttgcgcctttgtgaatcctattttttaaaggatttctatttttctaaggaaaattagtttatttttctttggtaaaataggaatcttctagaaaaatgtagttaccaaaccgacccttaatgtacatatctaatgtgttgcaaacttgcacttatggtgtaaatccttatggatcttgctacttcaaataaacatgatatgtctgttgccgacttctttcacaagatcacatggctcatcatcgagctcgtcggatgcccctctgcaatgagaaggtccccgcctatttgttggtggggttcggactcactatgactctatgcatcacctctatgacaatgaagaccgagcctctctctcgacgatatgttcgcacacatgattgtgtttgaggcttgccaactccaacacgtagttgaattgcagggggatcct

SEQ ID NO: 5518 - DNA, 2098 bp, Zea mays
  misc_feature (16)..(21): n is a, c, g, or t
  misc_feature (27)..(28): n is a, c, g, or t
  misc_feature (30)..(30): n is a, c, g, or t
gcacgagaccattacnnnnnncatccnnancaaaaaccagcccgacccaccaccaccatcgccaccattaccctctcgcccctgcctctccggccgccagcccatcccgtccccgtcccatgccgcagcgcgcagcggccgcactgacacaccagtgagcgagcagagcgagagcgaggcctgatgcggcagcggcagcaaggcgaggagcaccgggagatattcgtccagtggagaccctgcgacaagaagaggtcttaggccctccgccgccacgcgcaccggcagacaaatccgcgcaggccttcttccgacccgcaaaggcgccgcctttttcgccgattccacaggccggagcccggggagaaaggcagacagacagaccggaagatgagcgcgtccgtgggccggacccgcgtggggcggtacgagctcggccggaccctcggcgaaggcaccttcgccaaggtcaagttcgcccggaacgtcgagaccggagagaatgtcgccatcaagatcctcgacaaggagaaggtcctcaagcacaagatgatcgcccagatcaagcgggagatctcgaccatgaagctcatcaggcaccccaacgtcatccggatgtatgaggtgatggccagcaagacaaagatatacatcgtcatggagctcgtcaccggtggcgaactcttcgacaaaatcgcctcgcgtggaaggctgaaagaggatgacgcaaggaagtacttccagcagctgatcaacgctgtcgattactgccatagccgaggcgtctaccaccgcgatctcaagcctgaaaatctcctgcttgatgctagcggcacgctcaaggtttcggattttggactgagcgcactatctcaacaagtccgagaggatggtctgctgcacacaacctgtggaactcccaactatgttgctcccgaggttataaacaataagggctatgatggagctaaggctgatctgtggtcatgtggagtgattctctttgtcctcatggcggggtacctcccatttgaagattcgaacctgatgtcgctctacaagaagatcttcaaagcggatttcagttgcccgtcctggttctccacaagcgcaaagaagctcatcaagaagatacttgaacctaatgctaacaatagaataactattgcagagctcattaacaacgagtggttcaagaaggggtatcagcctcccagatttgaaacagcagatgttaatctggatgacgtgaactccatcttcgatgaatccggggagccagcacagcttgttgttgagaggagagaagaaaggccatcagtgatgaacgctttcgagttaatctctacgtctcagggcctcaatctcgggacgctcttcgagaagcaaacgggttctgttaagcgagaaacaaggtttgcgtcaaggcttcctgcaaatgagatactgtcgaagatcgaagcagcagcgggacccatgggcttcaacgttcagaagcgcaactataagctgaagctgcaaggggagaaccctggaaggaaaggtcagctggccatcgcaacagaggttttcgaggtcacgccttccctgtacatggttgagctgcgcaagtccaacggcgacacccttgaattccacaagttctaccacaacatctcaaatggactgaaggacgtgatgtggaagccggagagcggcatcgtggaaggcgacgaggcgcggcaaaggaggtccccgtgatggggtctgcaaccaagttttagaagtagcgctgcagataactagtcatcagggagcctggcgggaactgagcctgtgactgcttcctgtttgtttggatgttttgtttttgtctaaggtgctttctgactaaagtatgctggataatgtgaatgaagaatgtgcagagttttcagcaaaaaaaaaaaaaaaaatgttctttaaaaaaaaaagtgttgcacgtggtggagagttgcccgttgctgacgaacttgctatcttgctagctagagcctagaggataaatatgaattcaaaatacgagtagaaatatcttaaagtctgataaattttgtagagaaaaatataaagatccaac

SEQ ID NO: 5519 - DNA, 2145 bp, Zea mays
ctactctcttctaaagaaggttctgctgctcttgacaagtttcataaagcgtccccatcagagtcttgctggtataggtattgctgcatttgttcgtttgatgagcagtgctggatctatgttcggggacctcgagccgccgggggggggtctgtcattgaaagaagctgccactgagacacttcctgatttcacttatgtttcatctggagcctaactggaaaatgtgccaacagaaaatggagtctctgctgacaatagagaggacgaatctgaaccagtagcggatgacaatgaagaatcctctagatcaaggaatctatactttacaattggtgatgccaaatgtcgagctgctgtacaactcctgttgattcaggctgtgatggaggtatataacatgtacagaggacagttatcagcacagaacacagtaatcctcttcgaagccttgcacactgttgccgcacatgctcacaaaataaacagtgatagtgatttgcgttccaagttgcaagagttgggctcgatgacacagatgcaggacccgccattgttacgccttgagaatgagtcgtaccagctgtgcctcagtatccttcagaacatatttctggacagctctcctgatcatggaagcacagaggtggtggagagtcaccttattggcttgtgcaaggaggtccttgaggtatacttgagcacagcaagaccttctcagccttccagtggcacacagccgctaggccattggcttatccctgttggttcatcgaagcgaagggaacttgcggcaagagcacctcttgttgtctcaaccctgcaagctatcagcggactaggtgactcagctttcgagaagaaccttcgccagttctttcctcttctcgctgggctcataagctgcgagcatggttctagtgaagtacaggtggccctgagtgatatgttcagcacttgggttggcccactcgttctccagtcctgctgatgctgaacatcatgttatacatagtagtatacatcccattgtgttcctcctttcctccattatgttatgttaatcttttagtcgctgggagttcataatgttgtgctgaactgatcatgcagatcaaattttcgttgacgttattttcttgttcgtatcgggaggagtgtatgtcactatagagaactgaattatgtacggtagtttagctaaaattgtgcccattctgttcctaatgtgctgatttctagatttttaggcatgttttgcatgcttttgctcagtagcgtttctcctttctggaattctggaatgtggtagggttggattataattcttgcgagttgggtgtgttaggctatctccttttatcttaccttctatcttaaactctattatgtaatcagtgcaatttatagtataaaactgtgttttgcacgtccatttacactggctgttggagatggccatagcggatatataaatttccatatattccaaacaataggcatatatgagtgttttgatcaaggaaaaattaataaaatatactgacttattatttatataatgtgttgttatttgctaaagaatcaatatctcatgcattttgaatataaatctgtatatgcaagtttgtgtgtgttggtcatggctttgcacaatttgacttcctatataaacaaaagatgcctattattttatgatggagagcgaattataatttttttagttgacattgatttatgttgattgttgattagcatcaaaaagtgatacaagtaacaagtgatcatctttcatcgtaaacaagttcaatatctcgctgtactctggatctagaagagagaacaaccaagagattctgtccaaagatgcgtatttaaaataagctctatggaggtttacaactgtacccacacgaagaccaaggacaaaccttcatactagtgcccgcaggtcgccgatgaacgggtttatcagatttatcgaaaaatctgtcatttttatcgttttgctttcagatggttttttagaaaactcaatttgcatagtataatacatagattatgtccaaatcatctaagtcgaaaaatacacatataatattatatatatatatcttatatcttatgtactaactattaagccag

SEQ ID NO: 5520 - DNA, 1130 bp, Zea mays
ttttttttttttttttatttttttttttttgatgagccagttccagtgatcgaactaaccaacacgataaccacaagactgcactgataatggatcatggatgtttcatcaaggaagctagaagcgcgcgctttattgccatgagcgcatcacaccagactagttatttacaaaactctgccacacggcggaacagagcgcccgatcgatcgggccggcggagacgacgaccacaacatcatcacgactaccacgctgctagtacttgcaactcctactgctactaccggctagtataatacacggaggcgcgcgcggggggaccaggacggccgccgctaatcaggcgctggccttgttgaccttcttgccggcaccggaagcggcggcgcgggctggcttgggcttgggctgcgcgggcgccggggccaccttcctcgctcgcttcgcgcgcaccttacgtgcctccctcgacggcgccgaggcagcggccgccggcttcttcttggccggcgcggcggccctcttgcgcttggccattcccgccgacgccttcttcttcgccttcgcggccgcggagggcttcctctcctcggcggcggcgagcttgaaggaagccttgaccttgacgaggcggcccttggcggcgaagccgcgcagctgcactgccagcaccttgcggtaattgggcgggagcacgtcccggtgcttctcccccatgtgcttggcgatcgcgtacgggctcgccccgaccttcccgccgtcctgcgacaggatcgcctccttgatcatctcgaaatagggcgggtggtgcagcccggcggacttgggcttcctgctccgcggcttcctcgccttcttctccttctcggcggcggggtcggccttcttcctctcgtcaccctcctcgtcgggcttcttcccctcctccggcttctccaccacctccttcgccgcttccggcgccggctcctcggagacggtgacgaccggagcaacttcctcagttacggttgccatgaccagaaatcagtgatcactctccgtcagtgtgcgtctgacgcaagcggttgctcctactcggtactcgctgtttttcgattaggatgttctaggtaatggtctcgtgc

SEQ ID NO: 5521 - DNA, 1973 bp, Zea mays
  misc_feature (1949)..(1949): n is a, c, g, or t
gcacgagaccattaccccgcgcggccggccggcgggacatccctcaaccggtatgtgtttcgtgccaactgctgtaggaagtaggatccagcagtctgcaaggtgtccaaagaaaacaacacggcaggagtgaagatctctgataggatgacttcagtgtctgaatcaacacttgtgctggcttcaggtgcatcaatgttaccgcatcctgcgaaggtacggacaggtggtgaagatgcatattttatagcttgtgatggctggtttggtgtagcagatggagttggtcagtggtcatttgaagggatcaatgccggactttatgccagagaactaatggatggctgcaaaaagatcgtggaagagacccaaggagctccggggatgagaaccgaggaagttcttgccaaggctgcagatgaagcacggtcccctggttcttccactgttttagttgctcactttgatggcaaggtccttcacgcatcaaacatcggagattctggattcctcgtgattaggaacggaggggtccataagaaatcaaacccaatgacttacggtttcaatttcccgttgcagattgagaagggcgacgaccctctaaaacttgtacagaaatacgccatctgtctacaagaaggcgacgtcgttgtaacagcgtcagacggtcttttcgacaacgtctacgaggaagaagtagcaggcatcgtctccaaatcattagaagctgatctgaagcccacggaaatggccgatttactggttgcccgagcgaaggaggtggggcggtgtgggtttggaaggagcccgttctcggactccgctctcgcggctgggtacctgggctactccggcggcaagctggatgatgtaacggttgttgtatcgattgttcggaaatctgaagtttaataaactagaaacgaactctcaaagttgagcgcacttcttatttttttcttcttctttttctcttcttgcaacagctgcactcgctggcaaaatgcccgtgagcatttcgcacgtccctggcctacgcgcccaggcgcattgcgaaacgtgtattgtgtacacttgatacatactataaggttgtataagtatatttgaacacggccctcagtaagctgcgagcccttcaaatgaacatcgtgatgtacttactcagcggcagcgaaatccatgaacagccgcaggttcaaaagcagtgctactaaaacgaaacggaaacgctcacaagatacatatctcggtacatgatttgtggtcagactgggggtaaggtggtacgggcggagcgcatgaactcgggtgagtgagcccagctcacaagatccggtacaccaacagagtcgcggcagcgaggaaggtgaaggcccgtggtggtgccgagaggccggcagcggcggaacgcgctggggagggcgctggagcgccgctggtctggctccgggttgctgccggtgatcccgaaggggttgacggcgacggcgtcggcgactgcccgaagtctggggccccggacgagggagccggaactgaaaccccggccccgtgccggcctcgaggttgtccccactcttttaagacgcaaaagacacgcgcaatttacataccaggagacgcgctgggcacaccaggaacagaaactgcatttaagggcgaggtcactcactcgtcagtcaaacgatcgatcgctcccaccgcgcgccatcacaaaaggcaaaagcgacgagagcgtaccgtggcacttgctgacgggcggcgtcttgaccttgcacgcggcgggcagctgcagggccctggtcatgttgagcgagaggccgaagtcctggccgccctggaagagctggcagaggcaggccacctccccgcgcaccacgtccctgagccccgagcagcaggacgggtcgggcgccgccgccgtgctcccctcctgcacgtancccaggcaccccgccagccccagc

SEQ ID NO: 5522 - DNA, 1781 bp, Zea mays
  misc_feature (1777)..(1777): n is a, c, g, or t
ttcaagcaaatgatatcgttctattgaccctcccgtaataaatcaagcaattccaaagctgaagatctgagtgatgtacaataaagatcaattttagtgaattttcatcaacattaaataagctgacattgcatagtaacgagtcttgactggtctaaaaagttccctttgcatcagtcaccactttggaattttcaaaataggcagggcagtaattgcagttacatatataagaccaactacatcgacttgcttgaccttctccaaaggatcggatcaactttggattacataggtatcactgaagttattaaatacttaggcatcacttggagttctttcgattgggtggtttactctggctgttcttccctcgtagaattgccatcgtcgggccaagggcgctgctcctgagggctctgtaagaccaagctgacgtactagcattttgtttccatgttgcccagccattttgcagaagatcaaccttatcactgggctcaccatttttttcccagaccgtactttctgactttcctagtgcgcgttcttcgcctttagtgttgtttgacaccaagggtgatttctggctctcaatattgccttcgtttttgtgcaaggtaactggccttccggccggtgctgatccaacttcgttgcatgtttcgatacccttcagtagccttacatcaacaagtgaagagtactcgatctccaaggagccatcttccttgtacggtgacaaatccacaagcatatctgactcgtccttgttttctttttcctcggtggtgattggatactcttgaacgggtacgagaatgatacgcaatgatacgggatcatataccagaacttttcccacacggtacgaagagagctccggacacaacatggaagacagctcaaccaatcggtaggcaatcagatctccctcctttggaagtcgtgttagggggtacaagctctcaaaattgaaaggttcgctagacttttcttcattagcaatattttgcacactggacatctcaatgttactgccttcattgttccttcgattattgacagcacaaaagccattttcagtaaccttaatgtccatgacatgattgttaacttctgtgctgcatccagctattcctgcatgatagccgatatcagcatttttcttgtttgagctattcattccccacttctggcccttctttttgctcattgttgcactccattggaacgtgccctgtaactcctttgctggcgatttgtcgggttctccacctgctggttcaaagcgaatgtgaccaggccgaaccacaactgggacaatctcatccgatgtatcagattcttcctcatctgctttgatgcttgaaaaatgaacatgtgatccattttgattgcttgatgggacaggcaagccatcttgattgcttgatgatggaaaatcaggagctattagtgaatcttcatgcacattcttatctgtttgtaattttcctctctgtctcatcagccttttaattttcttgcgacgagcacttctactctccaacttttttgtatcactttgagcattgtagtctgccacatttgcctcacatttcaattcggttttattgttcccctctgctttttgctgatccaccaaggtagtggtagtttcatgatttagagttgctttcttatcttcaatatcaataactgacaacttcaactttttagatccacgctgttcttccttgctgcggacgcgtggcgtccccccgggttttccggncctg

SEQ ID NO: 5523 - DNA, 2583 bp, Zea mays
  misc_feature (2009)..(2009): n is a, c, g, or t
ctcgacggccgccttggggccccccggggccggccgggaggcccaagcaaagcatccagcggagccacaccacaccacccttggtccggcactagcactagctatccagtggagacgaagatggcgacggcgcggtggctgcaggttgccgccatggcggtggcgctgctggcggagtgggcgacggcggcggcgcctcggaagcccgtggacgtgccgttccagaagaactacgtgccgacgtgggcgcaggaccacatccactacatcgacggcgggcgggaggtgcagctgtacctggacaagtccaccggcacgggcttccagacgcggggctcctacctcttcggccacttcagcatgcacatgaagctcgtcggcggcgactccgcgggcaccgtcacggccttctacctgtcgtcgcagaactcggagcacgacgagatcgacttcgagttcctgggcaaccggacggggcagccctacatcctgcagaccaacgtgttcaccggcggcaagggcgaccgcgagcagcggatctacctctggttcgaccccaccaaggagtaccactcctactccgtcctctggaacctctacatgatcgcgttcttcgtggacgacgtgccgatccgggtgttcaagaacacgagcgccgacctgggcgtgcggtacccgttcagccagccgatgaagctctactccagcctgtggaacgccgacgactgggcgacccgcggcgggcgcgagaagacggactggtccaacgcgcccttcgtcgcctcctaccgcggctttccacgtcgacggctgcgaggcctccgcggaggcgcgcttctgcgccacccagggcgcgcgctggtgggaccagccggagttcagggacctcgacgcgcgcagtgcctccatgtccatgtgcagcagagccagcctatgccctgccgcctgcccctgcacagtacactacgtacacgcttgtctgaaccctgcacaccaccaccatggccggccacgggagggcccgcccaataatctcttcctcctcgtacaccgtgcagcaccatcgcgcgcgtatcctacactacactttaattccggcctccactccagcccacggcaacggcactaactaatctgagggatctatctcccgccgctccgccaggttcttcgtggacgacgtgccgatccgggtgttcaagaacacgagcgccgacctgggcgtgcggtacccgttcagccagccgatgaagctctactccagcctgtggaacgccgacgactgggcgacccgcggcgggcgcgagaagacggactggtccaacgcgcccttcgtcgcctcctaccgcggcttccacgtcgacggctgcgaggcctccgcggaggcgcgcttctgcgccacccagggcgcgcgctggtgggaccagccggagttcagggacctcgacgccgcgcagtaccgccgcctggccgacgtcaggcgccgctacaccatctacaactactgcaccgatcgcgaccgctacggcgccgccgtgccgcccgagtgcgcccgcgaccgcgacgtctgatgatgatgcgttgggccggcaagctgcttgatcgagagcagcctgtaatgtatgtatggtatggtattgttgtgtgtcaggttcgtcgtcgtgggtctgcagagacacagagagagtccgatccggcgcgtacgtgtgcccgcgtgggcacatgcatacgtacatgcttgtgttgtactgtacgctcgtatctcctcacaccgaaatgaattgcgattaagtatcgaaatttcggcagcttatccatcatgtaatgagttcctctgcagtacttaaaactctcatcgtctcttgtctgtatatctatacaacttcttgctcgaagtagtccaaaaaaaaactcgacagtagattagcatctagtggtatgagagttttacgttcatagaaggttactgcagacgcgaactgcttgtctacttccacccatcctatctntcgtgtcatctcttttactttttaaacagtgtactccacaatcttattatgctatataaatattaaaaaaagaaatctaggtacaatttgatgcacatataaaactaatcaaaactgaaccgatagtgatgtttcatagaaaattaccaccaacggcagcgcttgcctactctatagtaggggtcataactgtaggagatagatagatatcccatgggtaatcgtcacatggacatgttccataggccgcttaattaaacataccctcgataagttgttcaccaagttgtgttattgggccgaagttcaggagaagcaggtactatcgggaggatgacacgctccgccagaagtaacacgccccgcatgcaaccggatagcggatcattcaacgtcaaactcgaagggaagcaaccatgcaccggaaaagagtcggcacgcaagaatagcgaaagtagataggcccagataaattttcacgatatgtaaatagatatctcccctgccggctataaaaggccgcggaggtaccctacaaaaatatccccctctctctcaccatcgcgcccaaagg

SEQ ID NO: 5524 - DNA, 1764 bp, Zea mays
ttgggtacctcgaggccggccggacgctccccaccacctcaaatttctgggcctctctcctccagcctgcatagccaacccttttgataaagaaacgggcctacactacacgggacacctgcctcctccccttctcccatctctccccctctccctctcgtggccacgactgccgctgccgccctacgccaggtgtccaggtcatctccggcccattcgccggcgacgagcaccccactagatcgaccgagatatggacggcctgtggcatctgggggacgagctccgcgggcagcccaaggtggtggaggaccgccagtggtcgctcatgacgtccaagctggcagagatcaccaggtccaggggcgagaggacgaacgacctcgactacgccaggatgaacgccgcccccgacgccaagcggtggggcaaggcggcgtcctaccagcaccatgacgagggcaggatggaccaccacgtcggcctcagcctcaagatgaacgatctcaagatgaacgaggccgccgctgccgccgtcatgaagctccccttccgcggcgtgccctacaacgtcaacccgatgtaccccaaggggagcaacgccaacgccaatgtcaacgcgttcaagatgaatgtcggggtgaacaagtactccagcagcgcgaacgggaaagacgccggcgggaaaagcagtggcggtggcagcaacaacaacagcggcggcggaggcaacggcaatgggaccgccaacggcagttccgcggtcgacaagcgcttcaagacgttgccgacgagcgagatgctgccgaagaacgaagtccttggtgggtacatctttgtctgcaacaacgataccatgcaggaggacctcaagaggcagctttttggattgccagcaagatatcgtgattcagtccgggcaattactcctggcctgcctcttttcctctataactacaccactcaccagcttcatggggtatttgaggctgccagtttcggtgggtctaatatcgatcccactgcatgggaggataagaagtgtaaaggtgaatctagattcccagcgcaggtgaggatccgcgttaggaagctctgcaagccgttggaagaggattccttcaggccagttttgcaccactatgatggcccaaagtttcgccttgagctctccatcgcggagaccctgtccctgctagacctatgcgagaaggaaggcatctgagctgttggctgcctcgtgaggttctagtaaatatcaatcatccttgtatgttctgtggatggtggttggcaatgttgtttatttttcaagcgcaagctgctgccggtctcgttttccctgtcctggatggaagcaaagggacctggtactttgaaggccccccctcaaacataagctgtgagcctgtcagtgcacgtgtccgccgttgtcgtcaagaaccaaaccaaatcatgaaatcttgcgccgacggagagttggagcgtgtatgttttgctatctctatctacatgtctcagtagagtggatataccctggggtccccaaaagatgggggcctgtatgtaacactacgtgtaatggttaaggtgaatgtgccgtgaggccccccaaaagttggagtgtgtatttttgttgtcaccttgaaccgactttgcgtatgctttttttagtgctgctaccttttgcgctgtgtttggcttctggttcatgtttttgtaatataaggtggcttgcgcaaaaaaaaaaaaaaaaaaaaaaaa

SEQ ID NO: 5525 - DNA, 1354 bp, Zea mays
ttttttttttttttttttatctaataatctatttgtatgttcaactcaacttaaagggcagccaacatattagagccaacaatttggagcaattgaccaaactattgaaaaataattgtttttgtgtgtgtggctagaagtagtagctggtcaaatccttggatgccaagaagaagaagaagaatagccttgtctagcaagaagaagatagagggatgatgtgattatacgcaaaatactaaaacctagggtggtagtacaagcagtagttatgagcaggcctcttctctttctttcctgttccgttctttttctttttccctgcggaattccccttcttccctagtgcctcgattcgatatttcgattggattggattaccaagggacagagggagggaatcccacacacacctctggccctcgcgaggccaagggaagggaagcactcagcacccagcagcagaaggaccgccgtaaatggcgctgccggtggcgaagctggggaccctggcgctgcggacgctgtccaagcccatcgccagccgcctcaagagccaggccgccgtccaccccaagttccgcaacttcatcatcgccatcgcccaggcaaaccaccagatcaccacaaagatacagaggcgcatttatgggcatgccacagatgtggcgatcaggcctttggatgagcagaaagctgttcaagctgctacagatctcatcggggaagcctttatcttctcggtcgctgttgctgctctaatttttgaggttcagagaaacgcaaggtctgaggctaggaaggaggaagctcgtagacaggaacttgaggaattgaaacgaagggaagagagtatagctaaagaattggaagatcttaaattgaagcttagtgaaattgagcagcttgctaaagggcgaggcctgacaggaatcttgaacttgaaacgggtccatggcacagaggtcggcaaggcagcagcacctctgcgtgagtaagcaatccggctttggcgcaggaaagtatgattccttgtcgcccccattatttggtaagacttgtgttgtcgtgctcaacctattctttggtgctcatattggatccacatttgtagtggttgatccatggacaccctgagacagtggtaataatacagcgtaacaaagaaatcaaattaaagcgcaatatgtatgtgctacttggtggcggtgaccacaaaatcagatgttaagatggattagggcttgtttggttgtatacttaaggtgtaaaaaatgccacgtttcagattaaagctggttgtttggactgttgcaactaaaaaaaaaaaaaaaaaaaagccaaaaaaaaaaaa

SEQ ID NO: 5526 - DNA, 743 bp, Zea mays
cccgcgggtcccgcggcgcgcccggccgcagattggcggcagcaaagcaacacgcgcctcgatcctcctcgcccctccggcctctcctcccctccctgcacccgcacctgcggagagcgccgcaagctagctgcagaggagcgagacagtagcaggaggaggacgagaggaagaagagatggcgggctgtgatggagccaagtcgtcggcgtccatggaggaagaggcatgcgcggagaagaagtacggagggatcgcacccaagaagcccttgatatccaaggaccacgagcgcgcctacttcgattctgcggactgggtgctgggcaagcaagccgcgaacagcagcagcagcacgaggaccgcagccgcggtcgagtctctgaagcccaagctgaagagaacgccgcaccaccagctgccgcctcgtaagcccacctgcgcttccagttgagacgcatggccacgcgtcgcagctgctggaggaggagctcggtcagagtcaaggactgaggatgccgacgagctcgagctcggataaatgttttagctggtccggaatcgtagggacgacgacgagccagaaagatccgaatccgagatgccgtctggcttcttggcgagcagcgcctgttattgtgtgccataaagaacggatcaattaattatcaattgtctggctgaattctgacaaaaaaaaaaaaaaaaagagccccaccaaaaaaaaaaaaaaaaaagcggcc

SEQ ID NO: 5527 - DNA, 1095 bp, Zea mays
  misc_feature (67)..(69): n is a, c, g, or t
  misc_feature (1081)..(1083): n is a, c, g, or t
  misc_feature (1091)..(1092): n is a, c, g, or t
ctcttatgacgaggataggtatagtatacgacacaaattgttctgagcttctaagcttggactatcnnntatggttccagtaagaacgatgcatggttttatcatgatagtgtagtggcccctaggggtgttgccacaccgttaattttcttccctgttgaggagggtggctagattgcttagtaagaacgatgcatggattcaaccaatttggggaaaatgagctcgttcacccctagtgtagcctatcatgcttcattatcttctgatcagtagttactgtgtgttttattatttcatacatattctttagtcacacttaatgttgggtgctaagtagttgcattaatattgggtgctaaaatctcaagtcaatttcttatgtcttcattcatgtgatgatactatcctagactaggtatagaagataagacactccaactataaaatccttgaagaaaaatggtgtaattactttgcacttaatttagatatcaaacttaacctggtatctacaatgtgtcactaaactctgtccaagctagaagtatgcagactgtcccttatccttcagtatttttttaatgtcgctcaagcaatttgatgttcaaatatggttaggattttgttggtaccactgggttttactgacttttgacccaatgcctcctttgaacatttttcagagtttatagagcagcacattccaaaagtgatacagaaaactcttgtgagtcaggtagtttcaggtgtcttccgcagactatcagaatcatatcatgtaagcaatcgagaaatggaacaatactctcccctttctctgatgtgagaaacagctctagtcaacaagaatatagtactagatcctcaccactgggttcatcaaagagtgcaagcaataggatgactgatccatcactgggtaaagtagattcattccacaaggaaaaggacatgatcaagattgaagaaagttgagttgcctctcactgttctcgtatgtccatctactggttttatctctagatactgacaaaaaagaccattttaaaactgcaggcttccttctggagctcgggtnnnatccaatnngca

SEQ ID NO: 5528 - DNA, 481 bp, Zea mays
cagattccttttctgatcagctatatcagctccatcatgacattaatggagggtgatgtgatactaacaggtagtgacattttctgaggttaaccagcttgtttttgcgcatctgaggtctttctgcgggcaatccattatttattttcgtctacaggtactcctgagggtgtgggtcctgtgcgagtaggtcagaagatcaaagctggtataactgacctaattgatgtcgagttcgatgttcagaggcgcaaccggtcattttccacatgatacaataagcaagaaagtaacggtaagcaacaaggattccgaacatatgagctggagctgatttttccaatacaacacataaggtagtaaaggcagcatgcttttatttgttgtgtgactaaaaataatatcagacaattgatttcgtaaaagcaaacctgttggtcaggtagatgatgaactaggtcagaacatcatgctgctattg

SEQ ID NO: 5529 - DNA, 400 bp, Zea mays
ctacaaatacgtttttgactgaaaatttactgctacacaaacccacggtgcacaatcaggaaatagtttgtcacttcaagttaatggtggctttttcatctgaatgctttggcctctagaatcactcttcgcgtatccataatcaccagtcactttcattaaaaggggtgattttctatctaattctgctatgcacctttttaagtaaaatgatattaggtgatcttttgttttggttatatcgatccaatttatcatcaatattaaatccacatgcctctaaaatagaggcaaacttttctatgtacaaagtgatcgatagtgttcttttcctataagtatatttatcctcttaagatgacatacagtctatatctgagctgaggctgctaggattaaa

SEQ ID NO: 5530 - DNA, 479 bp, Zea mays
aggattctgtttccagctttatgtaattggatttctgtaatggtccctttatttggtcttttatcatctttgttgctatatggtccacatctgttctatcgtatgaaagtattgcattggaagtattagtgatacactatctttagaatattaatgcatgtggcttctcaattgatctaatcgtgctgccaaaaattctcatgcattttttcacagtacacaaatgttacaagttgtaaaagctgattctaatttattgatgtgtgtgcagttcaagctttgcaaggttaggtctgttcagtttgggcagaagggcatcccttatctgaacacgtatgacggccgcaccatccgctaccctgaccccctcatcaaggccaacgacaccatcaagatcgatctggagaccaacaaaattgtggacttcatcaagtttgatgttggcaacgttgtcatggtgactggcggaaggaacactg

SEQ ID NO: 5531 - DNA, 1177 bp, Zea mays
  misc_feature (1147)..(1149): n is a, c, g, or t
  misc_feature (1159)..(1161): n is a, c, g, or t
  misc_feature (1168)..(1170): n is a, c, g, or t
attctatatatctaatgctgtgttcgcaatcatcagaggtcactgtctttgtccttatctttgtcacctttatctagaagccacatcatcttatctcgtccatttatgtgtttgaacaattgctgatgcggcttctatctattacacaggtcataaacgtgcccttgatgttacttctgttgtgcagggaaaggcgaggttctttagtgtcctgatgcttacatggggtatgcaacatataatctctgtttcgaaacaacagctgagaacataggccaccttcctcagagattgctctgtcattttctcttttgctgcagtgcaatttaattgacaaaactgaaaatggtctacgaactgcaggtctggtggctgatgttgatattgaatctgagaagtataggtggatgggaagtgctcgccttgatttttatgtatactctctacactaaaagcttatatcaagtagttgattttatttttttcatatctgtaagtttctctctctttttatataatggagttaacagagagatattggctgatcttgcactagcttggggcttggcagggtcgagacagatacagctctagctttactacttagttccaagccccaactgcaggaaatggctttttggttattgtaaatggtgtatagctttacttagatgtgcattcatgcattgtaacagccctagaagaaaagatcatagttatcatacctgaaaaaaatgaatcttctacggtattctggttgttagttcaaaataacatagattatataatctggacagattataatccaaaataaacatgaccttagtgttcataaatcataatagatgcagagcagagtataacgaaaccatattgcatatgctcaggcaccttttgtggctttatgttactctttctcagggtattttggatctatagtaggttgacacagtcccatgcctgccatgtgcaacgcaacttcttttcagcttctactccgcattctgaacctgcgacggtacaatgggcgtatcctttttgttccagcaccaggatacgaagaagttggtgatcctgtggaccaagctaccggttacgaaacaaacgggtttagcacgggatttcaagacgacggaagaaccggcannnaatggtgagnnngtgtggnnnatgtggc

SEQ ID NO: 5532 - DNA, 386 bp, Zea mays
cgaggaattccgcaagcagtatgttgagtcaaacaaggttagcacactaaagagattagggacccatgatggacggaaacttggccctgatgaggaccctccagtcatatcaagcagaagaccaagcagcatctatccattgtctgcctcaagcccgggagtggccactttagcttcaataccagcacctgtggtagctgctccagctgcagtctctgccaaagaggactcatttcctgttttggaagccccccagaccagcaagcgcaccaagtcaaaagcatctgatatctgtgcccagaccgagaacaactctgttatagtatcggaggcagaggctttggaacagactttgaaagagaaagctcgtctattggaggaacaaa

SEQ ID NO: 5533 - DNA, 1013 bp, Zea mays
  misc_feature (994)..(996): n is a, c, g, or t
tccacccccaaaatcactacccgctctgcggcgatggaagggaatcaaaacgcgtgcttcccccttccatcctcggcgttgcgcggattgcatggccatcgtttcgcgcccccaatccgtcgatgcaaggaacacgtgcttcccccttccatcctcgacgctgcgcgaattgcagattgcggattgcatggtcatcgtttcgccccagttcattgcccgcatcagatggaagggcgccccgatctgcctcacctccatgcaagtacctgatctgctgcgcccaatctcttgccgatttcttcctcatgcttcctcgtgtcctctccagtctcaccggttttccatggagattgttccagggttagttaaggttggtttgagctggagtcggtaggatttggggctgtccatagttacaggtttggtttctaggcttgtttgccctgttggtggttcatgttgcctgctttcttgcgctgctctccacgtccgcctccagacttgttacggttgcagaactcttgcacatagattctgctacgccagtccaagttaaggacatggtttttggcccagccttgtctgaattttaggttcgtttgagcttccattgctacgtcagttaaaaaggttcgtttttggcccagccttgtctgaactcttgcgctgaattttaggttcgtttttggctcttcttttctccctttttttatcaaatctattgcaattcaacagccatggtcgctggctacagagccaattaggttctcacttgagctctcgttcaaatgtgaagtattgatagtcacgccaatttatctccactttctgcatctaataaattccaagcatttttaccatctaaaaaaaccgaacctgcctgcctgttcttgtctcacaccacctgttaccagaatattattttgcatgaatcccttcctgattttgattctcagtttcccactgcatgcagcaatgaggtgtctgcctttcnnncatgagacgccaaagag

SEQ ID NO: 5534 - DNA, 1053 bp, Zea mays
tcgctcttggcgatagtcacatgtaaattttaatttgatggatcgttctgtatatatcatatcaaagtttccttttacatttcatttctgcgggattatagctgctttagttttagatcctccaaattatgtttcttcttttgtatcacatggataataaatttagcattggctactgttatcctaacgttgattcttgtttggcagatatctggctgagttgcttgcagagaggcagaaattggccccatttgtgcaagttcttcctttctgtaccaggctcttgaaccaaggtttgtttcctgtgcctccatgcattactaatgttgttaatctatataagttttttttcattagttcaaccattgcgattgttaatggcgcaacacactcactatcattagttgctatgcttagatttcccccaagtcttctaggttggggcacttaattgtatatctgtgtgaagttttgctggttgcctctgcacttttgtcttcttgggtttgctatatcatgtattttactatttgctgatcataaaatttcgttagagattttttttgtgaccgggttttgttgttcattcatttgtcatatatcccatcatcatattgatttttccttttttatggtgataaaaagataatactccattgaattatggctctaaagaataactcgtgttctcatagttgacaatggcttccatttatgtcaaccccaaggggctgctaacactctagtgcggctgctgtttatggcaacctatttttttatcttgtggatgatcactggctcactgcagctaatgcctatttttagcgaagtggagtgtttactatctcattggtacaatgcagttcatgtcattgtacaaatttagagatcccaggcaggttgcctttgccccggtttagagcggcatgcaaagtataaatgtcattattgtttctggcttaaatatgtatagttgtctaatactctaattgagttcttgttttatttaatgcagagattttgcgcgcatcttctatggcgcctaaccataac

SEQ ID NO: 5535 - DNA, 464 bp, Zea mays
cagacgatagcgcaagctccggtccatgtccgcgtgcacccaccggatcccgtctcacgttcttgctctgttttatgtgttttgcagctgcacaaggagccgacgctcgggttcaaggagctggagtggttcgccgacatcgacctcttccacgagcaggcgcccaaagccagcaggacgttggcggaggtgccggagcttttcggataccaggcggcgaacgacgcggcgtactacaggccggccaaagccgccggcggcggcggcgctggggttcgccagagcaagaaggcccggatcgaggtcaccgacgacgaggattacctcatagtccctgatcttggttaaataagagagcgcaggagttttgtttcttctcctgatgtgtacggtgtaccagagaagaattttactgtgtacaagctagtgtcaagtgttgtgcatctttgactgtagtgtcgcta

SEQ ID NO: 5536 - DNA, 360 bp, Zea mays
ggtggcgttggcgagcgccgcggggacggttcctgacaggcggttcccgtggaggttgagccggcgtagaaacgcgagcgacccaagctcggcggggatgtagccggacaggttcttgccggcgacggccacccctacgacgcgcagtccgtcgctggacgagctgttgacgcaggtgacgcccagccagcggcacgggtccgcatcagcgtcggaccacgacgagagagccatggacggatcgtcggtcaccgccgacttgaaggccagtaacgaaagcccatccgccgacagtgccgccgcaaacgccggcgccgtgagcaggagtaggatccccagcgagtttagcacactcattta

SEQ ID NO: 5537 - DNA, 1256 bp, Zea mays
  misc_feature (1219)..(1221): n is a, c, g, or t
  misc_feature (1235)..(1236): n is a, c, g, or t
gaaggtttgctattttgattgtccaaattagcagtactatgagcattcaattattgttgacttttaattttctatacatcttgagcatagtgggtcagtcaccgaaaccatcgagggaacatctgcggagttgatttcatatggcttttaaatcctgataagtgcaggaagcccctgaagaccagctggaatgaagctgtttttggtatcattaaggtaagtaacatggtcagcagtatatatcaccaagatatgcatcctattgctaatataaaatagaagttgaccttgaagtacatgttgttaacaacagatctatttattctggattcttatttaatcatcaccaggagctaagaatttaacttctgttaatttcagtacttcctccaagttgttgcattcctttccgaggagaatgcatttgcactcctgaaggcagacagcctttatgatcacatcacatattcaagtttctaccaggcattgtgtcaggtaccaacaacagctcatccttggtacactatactattgtcgacgacactggtgctgattttgaagtaaatgcagttaggaatggtccatcctgatagactaaaatcagaagaaattgaggagttgtggagtgaagctgaccgtgatggcgatggtgttattaactacaaagaatttcaggtaattccttgtgattgtttaagacaaatgttgaatcctgagttcttgaggagaggagttattttcgtgaaattggatccaacaaggacatttggaccataaaaaaagtagatgtcacaatagaatgcatgtttgggagaatataatgcattattctgataaaatgtggatataatctttaagtttcagaaaggtcagattttggtgaaatctcatcgaacaagtcatctgaatcctctataactacaagcattgcttatttttgctttgtatcaagaggacagttttttactttaattcaagatgtgtactgctctttctcggttataccatagatctgagtttccgtatataagcgaacagttgttctctgttaatattaattggcatagccctagcaaaaaagattgtggctaataagtcttcaaatctgaggtatgaaaccatggagtcattaaaattgttcaagtaattataacatatgcataaaaagtggaaatatcaagattataacaaaggaactaaatcacatttcttttcgaannngtggtaatctaacnngtgtttgtatatataaagca

SEQ ID NO: 5538 - DNA, 366 bp, Zea mays
ctgcggggtgcggctctcctccgccctcgccatgtgagggggagtccacaccacaggcagacgcacacacagctgctgagcctgagcgaagccgaagcgagcggctgcaggtgcggcggggccggtgggggagctctcagctcccggcttggtttggttggaatcggatctccttccttccttccttcctcgaatgcttctcgggcgtcgggccgagcggagtggcggcgatgcgtgcgatggagtgacacggaccgatggtggtgtggtgcatcggagcgagcgataaatgcgaggatccaaagccgctcttcttcttctttttttcccttcgcaaggaaatggagcagtggcagtactggtaca

SEQ ID NO: 5539 - DNA, 1237 bp, Zea mays
tagttttactttaataccattctgtttgatgcaacagcaacccttcatctattattttcacttttcatattttgttggttgtttaagttgtctgccttgtttctggtacacctaactattttctgccatcttaatatgttaatttgtcagaaagattggatcaggacatcagtgggattttggcaactacttgtgatcactctttccgttgctcatgtgtttcagtgtggaccaattcatcctgtccggtaatgaatggttgctttgctctttcatcatttaccctagggcagtaaacaatcagaacatggactcattttggcgtttattattttcttagtatgatatgtacattgcattgaatttgcaataacaagtacttcacttaaatttatagctgtgttatttgcataatcttcttggtgactagtgaatttctggtgtgcttgctattctttataacacttggaactatatagtaatttcaacataaagccttttcaaatgtctcagcgcttgttaatttgatattctgggcacacaataggaacttacccagaggcatgggcatatacataataattattgctgaattcaataaatgtctacatgtatatcttcaaagtaagtggactgcaaggaaaaatattgagtttggtcatgttaaccacgtgagtcataggtacattataataaggaaatgcttgcttatgttctccaatttattattgccagtactttattgagcatgagtggggcatttaccaatagttgtttgcatttcaggtatgccagttttgtcagaagcagtctgaaaattctacatgttctgtttgccaaaccactggaaacctctggatatgtgtgatatgtggttttgttggatgcggacggtatgtcattactgacttactcccgtcagtcagtaaaagctgatgttttcagacaagaaaaacaagctacatgcaagtcacatttcttgtctgaaagttaactatagttggctgtatatattaatattttctggtgtaagtcagtaatcagttatcactgccatgttaagggtgttcatatgaatgtatttgatatacatggttacgtagtccaagttaagattgctgcatggaaaacatttgtttatgatgatgcggacattagttattaccagaagaaataaatacacagcttggtatttgttgaatttttctacgtggccaatcaaccttacccttatgac

SEQ ID NO: 5540 - DNA, 375 bp, Zea mays
aggatctgagtgcccaacgtccagtgttaaggacgcatgtgccctcagacacctaggttatccccggaatattcccataaagcggggttacataccgtaattacagggagacctttacaaattaggcctgtaatacgcagcggccacgcaaggcctgttacaatgggccggatcacacgtgggcctccatgctggacgaggtcgcaagatgaaacgaactcgtcacaggtcttcgtccggtgacgtatgggacgaagggtctgcccgttgtcttgtctccgttggtgcagcgaggacggcgaaggcatcgagcgaagggtgacgtcttcgccttcgtcccaacacagacgtcgctgccgaattaggttcattcat

SEQ ID NO: 5541 - DNA, 790 bp, Zea mays
accttacaagtgcagcaaagaggaaggttaccaattattaacaaaatgcagcacatctcaccaaaagctatgataaggactgcgaaaaaaaaagaggaactatacccaggaacagggtaacaagtgatgtactccaaaatcccaaatccctaaatgaagaagaaaatagccacaaacacatatgtataaactaaagaaaacactattacaatattctcaaacgatcaaaagaaaataattccttaaacaacacaataaaatatgtttggtgcaccacagtacaataaaaatccaatgtgcatattataaagaccaaaaaagtaattaattagaagcttgacttcatctgaatcttgacagaaaattattacttcaatgaagcacgggatttcttatgccagccatattagtatatcagcgaatggaaaaggctgcccaaaagctatcttacagccaatcagcagtctcaattcccaaaactgtgttaagcacttagcctgaagctatcccagtacgtgactcccatagtgggaacaggctacatgaatacaaagttacatatcttttcccctgcttacaggcaagcaacagtgcccatcataaaacacccgttcacagaaacaaacaggcctcattcaaattatttacaataagacatgagatcatcttacttgatgccaagatcaatgtgctcttggataccaaatccaaagcagccagtgtcactgaagttcctcctcagcagctcgtactccttcaccttcaagccactctccagcagctgcattgc

SEQ ID NO: 5542 - DNA, 385 bp, Zea mays
tcagatcgttgtcaggatgaagaagagctccatgaacactgcaccaaagggtaggatacctccgaccaacaccgagacggctgggttcatataccatggctgctgcggtatcaggcgtgggatcttgtttgtcctcactgggccctctatggcaggcttcctaaacccaaggtagctgccgacaaagatgagtggcattgagattccgagccacaggaaaaccagtgccaacatggtggtgaatggcacagccccagatgatttcacgccccagaggagcatgttcagggcaaagaatatcacgaagacgactccagggaataccaagaccgtcttgatggcgaccttctcccattccagccccccgaacatcttgtgaagacgt

SEQ ID NO: 5543 - DNA, 412 bp, Zea mays
aaattttctttgcagaaactccactaaatcagtatactcatctcttgttcacctaaatgcgcttgcaatagatccgaggaacccaaatctttttgttgttggaggaagcgatgcatatgctcgtgtgtatgacattcgcaagtgcaagtgggatggatcatctgattttagtcacgcatctgactgctattgcccaccacatcttgttgacaataagagtgttggaataacagggattgcattctctcacctgagtgagttgcttgtatcttacaatgaagagaatatttacctattctctaaggatggagggctgggacctgaccccaaaaaatctgttaggattggagcaattgaagggtgcaaatcaacaatgctagcatctggacatgatgtttctcaacctgcacct

SEQ ID NO: 5544 - DNA, 837 bp, Zea mays
atctcagacttacgatgtccagttaattcaagggtatcaagtgcacccttggggcttgtttcttcgttgaatttcaacaggggatgcaagggaaagaacaaaatattcaatgtggataggtatggtttcttacacttcttgcgactcagcctcaaagctttcgtctagtttctgttgtgattaagaaatacagtttctcatctaaatcatccaatgcagacacaccaagtatagtacttctttctgttatgcgccaagaaatgccagaatcacaccactagcaactgcatcatttggggatatggctgattcttcaactcgtgagtatttgttacccatgtatatgacaagagaatcttacataattagtttacctacatttgagattatgtggcactttttcatattgaatttcaataaacatgagatatggttttctaaggaacatcaaagtagtaacgtgttctccagaataattgatcttacataaacattgaatgttttcattgccatcatgtatgtagggaacgagtaattccggtaatcagtatcacctgtttcgctaccaagctttgttttatagattatatgtacctgtgattgaccttttgatttgttgtttgtaacagttctgtataataatctttgagcattcttttgactgcttgattttatttcagctatctttccccgaatccatgtaaaagatccatatcagcgtctcggaatcagcagggaagcatcagaagaagaaattcgagctgctaggaactatctgataagcaagtatgcaggccacaagccaagtgttgatgcaattgagtctgcccatgacag

SEQ ID NO: 5545 - DNA, 675 bp, Zea mays
atctttgtattacaatgagatgcagtagagttacattattttccgagcaagattgaagacccccaacttttcacctgggccagagtcgctggaatgtgcactttttgctctggatgatataccattcgattctctagcattttcttcaatcattgtcaccttaaggatggtatttcctcctccctaattgtctcctgcctgcttcacatttgctcttgccatttatacgctttacactaaatgctttaaacatgtctactatttgccacagtatactgaagatgtgaggtctggaagcatcaaatttcactattgcacgataaacaaaaggtaaatcatcccaccctttttgtagtaactgatcatcatcgtcattcataactctgatgacttttacaacttaggaagcttacgaatctttctctagttttctatgtgttctgttgatatctcagtgcaacttttctacagcactcacctatacgacaatcttgcggcatcttgaagttaacaaatcctgctcgagtttccaatgtggtctataacttgttttgtgcaacttggtttacaggttaggagccagcccttcagatcttcggagtttcgatattgataaccatatagccgtgtgaggttgaaaggttctaaaccttttgcgattgaggagaatggttt

SEQ ID NO: 5546 - DNA, 375 bp, Zea mays
gttttgttcagcaggagtgcaagaaacttgtcattgttcacctatccgagagtattttgttgttctaaggaatttaaaactgcttgttgttccactatttgaactctgcaacaatgttcaggtgatgcagcattcatagtctcattgtcgatggtgtccggctgaaactttggaaactttacacatccattgagttctcgatctgggagcagtaaatttatcttttttgaagtagagattgtacatggcattcttgttttatctattttgtttcgattaaccttgtttgtcttaaactgcttacattccatatataggttactgcctccattctacagggtattgctagtatgatgattgaaatacacaatttat

SEQ ID NO: 5547 - DNA, 334 bp, Zea mays
tagatttattatttacgaggatacggaaaatatgtggcaggcctggattaaaaaaaggctatttttttctcattctcgacagatatgggacttgatgtttgttctctagtttggttaggaaataaacattctttttcgtcttaatgttgaggctcatttaggtgtttgatgtccatcaatggaagtctgatgtagtctgtagctagtgtatttagtgtttacttgaaagaactactgtacgcggatacgtggtttgcactagagcctcaagcctgcgggtccctcagctcgagacccactcatgcagatctcaacagggataaccctccaataa

SEQ ID NO: 5548 - DNA, 366 bp, Zea mays
tcgcgatgctaaaatggacgtgggctcggttcatgatgttgtccttgttggtggctcctctagaattccaaaggtccagcagtttctccaagagctcttcaacgggaagaagcttttcaagagcatcaaccctgacgaggctgttgcttacggagctactatccaggctgcaatcatgagtggagaggatgagatacaggactacctcatgaacgatgctacgcctctttctcttgggttggccacggatgggggtgtgatgaccgtgctgattccgaagaacgcaaccatccccacaaggaaggaggtggtcttgtcaactgactccgacaaccagccttgtatccgtatccaggtgtacgaagg

SEQ ID NO: 5549 - DNA, 387 bp, Zea mays
acaagttaccatgcgaatctactgaggatgagggcgctgctgcagatgttgctggtggaagcctacctccattgtccgcattgttttaatcgtagtgaagcatagggttcactcaacaaactaggcagcccttttctggttttagtcagtgctgcaaagcaatcgagttgttcagaattttcttgtgttgcaagatgaccacaacgacaactgtagacgtatttcagaatttttatcaaggaactcgaatgtgcagttgtagctaaactcccatgaatcctttcggtgaacatagggtgtgcacttatcaatctctttgctagggaaaactttaggcctgcgtcaccattgttgtgaaacatatgctgatatgcgtcttcgaacata

SEQ ID NO: 5550 - DNA, 411 bp, Zea mays
ctctatgaagctgatgctaacatttacagagcaaaaggatctatattagagcagtatagaagggtggatgtgaggcttacattggttgtgagcttgaaagggaatttgttgtttggctggtgaggttcttttgacttctgatgcaacgaggatagctgaaatagcaatcttcttcaatgtcttattatgcgggagcttgaaaatacttcaatttataagtttataggttttcatgttggagcatctttgtcatggtagcatgtaggttgctaaaatagtcagtggagtggaataatgagacaatgtctaagaacacttgtcttttttttaggacagtataataagaactgacgtttccctgtccatatggacgttccacaaaaatcttatttgctgtcatgatgggctcta

SEQ ID NO: 5551 - DNA, 389 bp, Zea mays
  misc_feature (382)..(383): n is a, c, g, or t
ctggtttcactattgatcgtttcgctcttggcagcggagttgcagcatgtgccaacttggctgacatagacagtggccgtgcgtttcatggctatttgattagaagagcgttagatactgatgtcatccagggcagtgcacttgttgacatgtatgggaaatgcggatacatggacctcgctcgattggtattcgacgggatggatgagaggaatgatgtttcatgggacgcgctcttatccgggttcgtcgaaaacgggctagttgattcagcacttgacacttttagacaaatggagtccgcaaaaataaagtctaaccagcatacctttgtgaaccttctgaggctctgtggtgatagaaggtacagagagtacggagnncaaatc

SEQ ID NO: 5552 - DNA, 400 bp, Zea mays
ttctcttcctcctctccgtcgtctctctttgtttgcagcatatggctttgctggtacggtgctcagattgtttccaagaacatggcattcacaaagctggtgaaagcttacagcatctgcatcgatctgatgactatatatatattcttgttttcagatatctgctgcttatttcaaagttcgaggatagtttttgcgtggtgcgctggacctgctgcttcaaagtttttggagagcttgggacgagatccactatttataggcgtgtattttcttcatattatgctgacacccatggtggttgatgtaaacaacacgggagctcatgcatgcatatgtattcctagagccaacaataataacatgatatataacatcgatgtataataaatataatgct

SEQ ID NO: 5553 - DNA, 554 bp, Zea mays
ctactgagctgtcaccaagacaaaagtccagggcctagtagcaaagcgtgcctccattcacgacccactgcgcaaagtggtcagagtagtcccgaatgtctgatagctggctgctagaacgggaaagatccgtgtcatcccttccctggtaaaatgaacaaggttcacagcataaagttcagatctcagaaaggccaagtaaccaaaaattcagttgatgtcaaaatgtcagataaaaagaagtccagataatgaggctaacctcatcagtgtgtccttgttcactgtatgacatagatgattcaggactgatcacatccataggtgaattgatcagtaatgacctgcaaatcacggatgtgatacatgttaacagtgcaagcagagtagtaggacatgcaaattactggaagtctatttattttacctctcaaaaacttcctcgtcaaacgaatttcctgaagatgacaacaaatcaaggtcaaagaaatttgaagagtgcaattcagggtaacctaatcttttcaaataactctgccgctcttctgacatga

SEQ ID NO: 5554 - DNA, 504 bp, Zea mays
  misc_feature (496)..(500): n is a, c, g, or t
tgtcgatggtgaccagcatctcccgcccgccgccgctcttcttctgacgctgacgcagcatccgtttcacgtccgtcgtcaggccctcctacgtacgtacatatgtatgtttcatgtatggagagtgaggacatgcatgcatgcatgcatgcatgtggtgatgtatgaagaagaagaagaagaaatggacatgtctttgctaggcagcaggatagctacctggagatcgaagtcactccgcagcagcgtgttggacgacgatgatgatgccgccaaagtacggaccaagtggccgcgctggcggacttggtggtggctgtttgcagccgccgccgccgccggcgaagctgctgcaaggagaagaggctccacgaaggaggaggaggaggaggaggaagagatgacgcgtgcaggtgcagcagacatggttgctcctggtagagagtacatcgtctactactcgaactaacgctaaacaacaaccagctaatcaatnnnnnaacc

SEQ ID NO: 5555 - DNA, 652 bp, Zea mays
cagttcctgcccagcttgcagggctgctccaatggccaccttgtccgccatctctgccaacgtcggctactgcaaggcaccaaccctgagctggaaggtaaatactgaaatttttcactggttttacatatctacagcactgcatatgaaatcatatatgaatccaagttgtaccgaagacgcatattacattattcctcgtgttgctgctgcttcgtaattggggtgccttctttgcagaatcttattctctacctgttttaatttgaaccctgcagggaagcggaggagtaccaggccggattgtggtctccatgtccaccacccgaagaggcctcgtctccctaagacgacgatcccctcggtttcgcgtctacgcggtaacgtggctgctgcaagtgcaagtgcaagggccggcccaattacgaaccccattttctttatctgatccaactgtgttgttgtatgcgcgcacgcacgtacgcaggcgaaggcggagacggtgagcaaggtgatggacatcgtgaagcagcagctggcgctggcggcggacgtggggctgacggcggagaccaagttcacggacctcggcgccgactcgctggacacggtggagatcgtcatgacgctggaggaggagttcaagatcacc

SEQ ID NO: 5556 - DNA, 356 bp, Zea mays
cttttcctgtataatcagaagaattgttgatctgtgccaagcccggccaagcgcttcagcctccaggtttttgggtaaggaattggaaatcctcctccctccgttgtgacacattattgatagaaacatgaaggatgaagagtcttggacattgagatcatttttcactctaacgctaacaccggttattccagcataatcagaagaaaatattgacatagatcttgatacccagcaatcagtacaaacaggtgccttgataaggctaacgaaacacatgaaggatgaatagtatcgccaaacatgtaaattcctgtttggtgaagaacaggatgcactaggagatcctcatgaag

SEQ ID NO: 5557 - DNA, 482 bp, Zea mays
taatggagcggcgatgtaagtaggccaatcttatttcaattcaactcactcatatatctgtctatttcattcatatttgctgatcactcattttcgcttcactctggctcgacataaaggtctgggacaccccgtggccagaaccctttcagctcaagggagggcttcacagtcaacctccgcacctttgccatggaccacgaacagtattccaagaagagagctttcgtccacgtcctactgaagagaaagaagaccttcgtgacggtgacagactccagcgggaacaaaaagacgggtgcctccgccggctgcttggaggacaggaaaggacggtcccgtctctcccgatacgcttccgaagcggtcgcggagcaggtcggacggtccgccaggaagatggggttgagctccatcgtcatgaaggtgaaaggggcttcgttcttcaagaagaagaagaaggtgatcctgagcttcagaga

SEQ ID NO: 5558 - DNA, 369 bp, Zea mays
  misc_feature (356)..(361): n is a, c, g, or t
ttcttgagctggaacagcgactccggcaggggccccgcgagggagttgttgtagagagttatcacgctgagctcggcgagctgcccgaacgtctcgggcaacgagccggtaagccggttgtctgccaatgccagcgcctgaaggctcctgcactcaccgaggctcgccgggatggggcccgacaggtcattctgccggagctgaagcacggtcaggttcctgaggttcccgatcctttcgggaataggaccatggaagtggttgccgaagaagtccacctcttccaagctcgtgcagttggtgagctcgtcggggatggttccggacatctggttctcgtagaggaacaagagctnnnnnnttctgaaa

SEQ ID NO: 5559 - DNA, 526 bp, Zea mays
tataggtgggtaacaaatctgctgtggcataagtttttgttttccttatctcatgagaattctattgcagtgcatgtggtcaataatccttattggttagatctaaacctaaaatgtcctcttgcatgaaggtggcattgtgagcaacactctacggccgccagtgcccgactcctgcgaccccgagtggaggtcactgatggagcaatgctggtcaacagaaccatctgagcggccaaacttcacagaggttgtgaataggctgcgctccatggcggcatcccagaaggtacaacaacactaagggaccaccaccggcacgcagaagttgtcccagggcagcagtcagtcaaacttgcaggttacatccatgggccgccaattcacgccatccgccatatatgcctaggatctgttcataacccttcatttgttcgtatattgtaatcaaaagttacccgccgtgtgtctacaacgtgtcgtcgcaatggacgcagcaggtgcctgcctattcattcattcatac

SEQ ID NO: 5560 - DNA, 418 bp, Zea mays
ctggagtagactgttcgattttcattcaatgcacaggttagttattggacttaataaacttttaaattacctcgtttcttttagtggtagctggaacaattccttgtaatatttggtttcaggcgctctctgaacgttcagctgaaaaaaagatcaggcgaatgcttttcccccgttaccagcgtaaaaacgtgaaagcctctactgaagatgagtcttaacctatcagctgtttttcctgagcaagcatgcaaacacctggttcaaagacaaggtgtcaagggaatcaacacgatatcatcttatgcgagtttgctagtagatagcgcacaacctgtcgactatgagaatgaccaaaagcatcagagtaataaggtttgccatgcatggtctctaacatgcttccaagaataaagtt

SEQ ID NO: 5561 - DNA, 507 bp, Zea mays
  misc_feature (499)..(500): n is a, c, g, or t
tgtctcggcgctcaccggtacggtaccgtggcagcatagcagcagcagctgctgctgcggcggcttttctctccttcttgttactgtttctcatcatcgtgcatgcaggcccaaccgtgtcccctgctggttgtacgtgctgtgcaggcatcgacgagatatccgcggacatggcgtcgcacaagatgacggtggtcggcatggtggaccccgtgagcgtggtgagcaagctgcgcaaggcgtcgtggtcggcgaccatcgagtccgtcggcccggccaaggagccggagaagaaggacggggaggcagccaagaaggacggcggcgagggcgagaagaaggaaggcggcgagggggagaagaaggaagcaggcgagggggagaataagaaggaagcgggcggcgagaaggacaaggacggcaagaaggcggcgccgccgacgccgacgccgacgccgacggagcagcaggtccagctggccgagctgttgaaccagtnnttaccga

SEQ ID NO: 5562 - DNA, 567 bp, Zea mays
gtggtcgtcttatgcaagaaaggccagggccactgcgcgcttcaccagagagagcaaggctacaaccaagaggtgtgctggaattatacatctccaaaagctagctagaagaccttggtgggtggtgagcttggaggaggagctcatggctgcttcttcgtcctgcatagcttgcaataatggcagtaccgatgagaaggaggagaagcggaagtgtgagctcgtcgggtatgaaggactgcctgagtggctcaaggacaacgagttcatccatggctactaccggtgcgagtggccgatgaaggagaccgtcctcagcatcttctccatccacaacgagaccctcaatgtttggtcgtgagtcccctggcctgacctcatcagtgtttctctacagtttaatttactttttatctaagtcgttactcgttaatactaatatatatatccttcagacagtaattcctgcactccacgtgtattttttttacctgacgtcgatctattctgctgctggcaggcatttgctagggttcctgctgttcctgtgcctggcaatctttacag

SEQ ID NO: 5563 - DNA, 580 bp, Zea mays
tcgtcacctatcacttatccctgagctcatccgctgatctgttatttggcttatacatacatcacagctctgctcaccactatcactgcaattatttttgtttctctgttctacttcgtagtaaaatcatactgatctggttggttctggtgcagaccctcccgggcccggtaaccgatcccagcaagctgcccaagtggaactacgacggctccagcaccggccaggcccccggcgaggacagcgaggtcatcctgtagtaagtgtcatggcacgccaggcttggacgcattcctttctgtttgctttactgaacgatcctttctcttgggcatgtgctgcagcccgcaggccatcttcaaggacccattcaggaggggcaacaacatccttgtaagtttgcacttctaccatccaagtggcatgaaccatacggttccgttccgtgttatttactgctacagtgcctactgttcattggtccaactcagatcagttcatctttgcgaagaaaaaagaattgtgtcttgttgcaccaagtagactaaaagttgtacataccctacaaataaattagatt

SEQ ID NO: 5564 - DNA, 493 bp, Zea mays
  misc_feature (489)..(489): n is a, c, g, or t
ctgcacatgttctcacctatgaagaccgggatggagactggatgatggttggggatgtaccgtgggagtatgttttttcctcctcctcctccgcttcatcaatcattattcacctgtgcatttcatttacgcggtcagttaattaatctcgtctccgtcgtccatttgttctggcaggctcttccttggaagtgtgaagaaacttaggatttgcaagaacagataaatgctagtacgttagcaaagcttattattcgtgcgctgcatatggactctatttctttcttctttttatttatatcggttcatacagcagaaagattttgctggccacagagtggacatgcatgtgataccgaggctatatatactgatcgtgtacagtatactgaagaaaagtcaatcttgataccttccctagaaaattaatttttggtattttttatgtttccttttctgttttctctgagtgccttgtaaataccatgngctg

SEQ ID NO: 5565 - DNA, 636 bp, Zea mays
aggatgagtccatacagccagacttctccaagctacaggtgcgcacaattctgtgttgtcaaagggtactctgtccatacatatctgtattgactgttactgtttctgtttgcgcagtccaacgtcaccgacttactctcctacatcaccatcatattcacaaccaagtccatcgtacagcccaacgaggtgagtgccatccagatcttcatatcttgtggtgcgtctccaattatcatgcctaccgccgtctgttttacacatttacccaatcaatgcagcccgttcaacacctctggaggacccagcccagactacagcccgacctctccaaattacaggcaagtcattctactgccagccaaatgtatacctgtcgtggaggacatggtttcgtgttctgacaaaccttattttgcacaacgcagccctagcggaagctactcccccactgcaccgggctactccccgtcgtccacaggccagggtaatgacaaggatgataagagcgctcgttgaagaggcacaggagaacaaggcgctctagagcactcgatgaaggcactcggtgatggccacatgggaagatcgaggcactttttttctttccttgagtttttgtatggttgatgaact

SEQ ID NO: 5566 - DNA, 389 bp, Zea mays
cctaacaaacacagaatcactcgtgtgacatatttcaacttagttcttatagcccaccaaatgaagagtttacaagtactagagcagacatgttttacaggcgtgactaaaattaacaaacacaggtgtgcatgacaaccagatgtccagactcccatataattttttcagtcacttctacctgagggctactggccagtgcaaatggcacgggtcagtcgaggaatccagtcttccgccagacagcattgcgtacctggcggagatcccgccccttcagtgtgcgcccggctccctccagcattgagaacgtcgtcatcggcgactcccgagcccgcgcgcgcgctaacatctcgtgtggcggtagcatctcctcgtattcatcctcc

SEQ ID NO: 5567 - DNA, 1214 bp, Zea mays
  misc_feature (860)..(860): n is a, c, g, or t
  misc_feature (869)..(870): n is a, c, g, or t
  misc_feature (872)..(887): n is a, c, g, or t
  misc_feature (890)..(893): n is a, c, g, or t
  misc_feature (897)..(897): n is a, c, g, or t
  misc_feature (899)..(906): n is a, c, g, or t
  misc_feature (909)..(913): n is a, c, g, or t
  misc_feature (916)..(918): n is a, c, g, or t
  misc_feature (920)..(921): n is a, c, g, or t
  misc_feature (925)..(930): n is a, c, g, or t
  misc_feature (932)..(933): n is a, c, g, or t
  misc_feature (937)..(938): n is a, c, g, or t
  misc_feature (940)..(945): n is a, c, g, or t
  misc_feature (952)..(953): n is a, c, g, or t
  misc_feature (966)..(968): n is a, c, g, or t
  misc_feature (971)..(976): n is a, c, g, or t
  misc_feature (990)..(996): n is a, c, g, or t
  misc_feature (1003)..(1003): n is a, c, g, or t
  misc_feature (1005)..(1013): n is a, c, g, or t
  misc_feature (1016)..(1016): n is a, c, g, or t
  misc_feature (1020)..(1032): n is a, c, g, or t
  misc_feature (1034)..(1034): n is a, c, g, or t
  misc_feature (1036)..(1043): n is a, c, g, or t
  misc_feature (1047)..(1048): n is a, c, g, or t
  misc_feature (1052)..(1059): n is a, c, g, or t
  misc_feature (1062)..(1062): n is a, c, g, or t
  misc_feature (1064)..(1072): n is a, c, g, or t
  misc_feature (1074)..(1076): n is a, c, g, or t
  misc_feature (1083)..(1083): n is a, c, g, or t
  misc_feature (1095)..(1106): n is a, c, g, or t
  misc_feature (1112)..(1121): n is a, c, g, or t
  misc_feature (1123)..(1130): n is a, c, g, or t
  misc_feature (1132)..(1135): n is a, c, g, or t
  misc_feature (1137)..(1137): n is a, c, g, or t
  misc_feature (1144)..(1146): n is a, c, g, or t
  misc_feature (1149)..(1152): n is a, c, g, or t
  misc_feature (1154)..(1154): n is a, c, g, or t
  misc_feature (1156)..(1156): n is a, c, g, or t
  misc_feature (1158)..(1159): n is a, c, g, or t
  misc_feature (1162)..(1165): n is a, c, g, or t
  misc_feature (1169)..(1171): n is a, c, g, or t
  misc_feature (1175)..(1179): n is a, c, g, or t
  misc_feature (1181)..(1186): n is a, c, g, or t
  misc_feature (1191)..(1200): n is a, c, g, or t
  misc_feature (1206)..(1211): n is a, c, g, or t
atgacttccgggttgccgccagaaacgccatcaaagcaggtaaataaccatcaaagaccagaaacgatgcatctctgctagcagaggcacataccgtgataacagtattcaagatcaaatagagagcatgttatttctagagccaagcatctgaattaaccggaaatataggtagagccaaaacttgaatgatgtatgcatgacttcacctatcgaagctagattgacgtgtgagtgatatattccacctacgaaagctagaatagtactgggcgcgtgtgattacacctactaaagctacaataattgacgcacttgcttccacctatcatatctatagcgatagatacgttactgaatatatgtataagagacaatcattatctatagaaacactaatgaaaatttcagtgtaatagccattagacgattagaaagatttacatgatatcacttaaagccatattacaaagtaactagtgcatgcattttgcagggtgtactacaaaattactaacacttgatctactcctgtgactataaggctttgatggagtggagatccacgcggcaaacgggtacctgttcgatcagttcatgaaggacagcaccaatgaccgagacgactcctacgggggcagcttggagaaccggtgccgtttcacagccgaggtgatggcagccgtcgcggacgaggtcggtgccaaccgcctcggtgtgcgcctctctccgttcgcggattatatggactgccacgactccaacccagaggcgctcgcgcttcatgtcatcgacgagacgctgaacccgctcggcgtgctttactgccacatggtagagccaaggatgcgggtgaaccngacgacgtnnannnnnnnnnnnnnnnnggnnnnggtntnnnnnnnngcnnnnnggnnnannaacnnnnnnannaccnntnnnnnncgaaaanngaaaaaaggggcnnnccnnnnnngggtgggcccccannnnnnncccccanannnnnnnnnttncctnnnnnnnnnnnnnanannnnnnnnctcnnaaannnnnnnnccnannnnnnnnncnnnattttgngtggtgtttctnnnnnnnnnnnnataaannnnnnnnnncnnnnnnnncnnnntntttcccnnnctnnnntnanannctnnnnggannngcgnnnnngnnnnnnaaggnnnnnnnnnntttttnnnnnnccc

SEQ ID NO: 5568 - DNA, 359 bp, Zea mays
aagtgagacttcagaatggccttgaatgcggaggtgcctacattaagtacatccgccctcaggatgctggatgggatgccaaggagtttgataatgagactccatacactattatgtttggtccagataagtgtggatcaaccaacaaggttcatttcatccttaagcacaagaatcctaagactggaaagtatgttgagcatcatctcaaattcccaccatctgtcccatatgacaagctctctcatgtctacacggctatcttgaagccagacaatgaggtcagaattttggtagatggggaagaaaagaagaaggcgaacttcctttctgctgatgattttgagccagcacttatt

SEQ ID NO: 5569 - DNA, 373 bp, Zea mays
tccactgcttctcgagactgggcatcatcacgtcaaatactagctgattagtagtcagttccttttgtaccttgtgtagatcagatcgattgcttgtttggctgatttgatacaattataaacaatgggtttacttttgagtgcactacttacaagcatcattcatacggatttcagtttacctaaacaaaccacttgccctcttctgctgcttggctggtttattacgataactgtgcagaatttctctctatgctagttctccctcaattccaaaatgtaagttgttttagttttgtctgagttaagcttctctaagactaagtttatagaacatcaaattggtttcgctgagaccaccaggaaatatgtc

SEQ ID NO: 5570 - DNA, 390 bp, Zea mays
tgagaaagatggtgtacagaaacagggatgaattcaggcacgacgtagcacagatacaactcaatgcacacatatacaacgacactcgctatcctcacatccctccgcttgctgacgagctcatggaggtctgcgaccatctgctttacgaaaacgcagatctgctcaccgaggcggaagatgctatcgagtagcaatataaaaagctagatttagcatttggatcttgctatatcctaacatagatgatgtatctatcttctgatctgtaggaggggaaaaggttgtacattttttgggcctagcagcaatctacatgtgatcccgaatccagccagcttctgttggtattgtgttgagaggtagtggaagtacaaaatgtctaggtta

SEQ ID NO: 5571 - DNA, 684 bp, Zea mays
  misc_feature (679)..(680): n is a, c, g, or t
cccttcagcttgaatctggaactgaaatcaccaggcaaccatttcaaatcatctaggctctggatttggattactgatggagttggtgggtttgtcagaaaccacatcatcattgcaggataattcaacgcgtcagttacaatatgtaataatatccttccaggatcctgccaaataagacaggctgaatgaaaagaagattctactgaagaagtcatggtgcagtcctcccttccatgctcattgcatctaaattttctttatacaacatgaacaaaataatcaaatgtaagtatccatccagtagtccgtcggagttatagaaaccaaaggcagggcaattacagatatgcagatagcataccgcagcagttcccacattgaagttccattattttaattgtactgcattcagcaagtacgaagctcacagaaaaagcaagccaggtattattgcttcacgaattcactaaaaaaaatattgcatcacgaatctaagctcatacctttgatgcagcaattgtagagttgacaaccacagcacttgcaagcacattgtcagagaacatcgcataatgataataaccacccaactgaatgttgtctcttttagggaattcacgtttagtgggatctaacgaaaagtattctgcggtaagctgcattgctaggcagtganncctt

SEQ ID NO: 5572 - DNA, 539 bp, Zea mays
gtcgaggatgaagaagaggacgaggaaggtaacaagcgagtcgtggtgcttggcccccaggtccccctcaaggagcagctcgagctcgacaaggtacatatatgtcctctcaatgcatgcttgaataatgtttctgaacaattctgatagatgatgatctgctacttgcttgcataggatgatgagagcctgaggaggtggaaggagcaactccttgggcaggtcgacacagagcagctgggaggtgatcgatcattaaattagaaccaccataccctgtcgtcctcatgttcataatatggattgtgccgtgcccgtgctgcattcctgaactgctgtgttcttcggcgcagaaactgcggaaccagaggtcaaggtggtggacctgacgatcctgtcacctggcagaccggacctgatccttccgatcccgttccaggctgacgagaagggctatgcgtttgccctcaaggacggcagcccctacagcttccgcttctccttcatcgtctccaacaacatcgtgtcaggcctcaagt

SEQ ID NO: 5573 - DNA, 508 bp, Zea mays
acgctcacaagttcatcagctcggcgctccaggttagtttctctaatctgattgcgtcaagagatagtctctctatgcaatcagccaggcatcaaaacctgttgctgagtgaagtgcctacctgggaaaaaaaatgcagggatatgacacaatggttggagagcgtggagctcagctgtcaggagggcagaagcagcgcgtggccatcgcccgtgcgatcgtgaaggaccctcggatcctgcttctggacgaagcgaccagcgcactggatgccgagtccgagcggatcgtccaggacgcgctggacagggtgatggtgaaccggacaacagtggtcgtcgcccaccgtctgtcgacgatacagaatgcggatctgatcgccgtcgtcaggaacggggttatcatcgagaagggaaagcacgacgccttggtcaacgtcaaggatggcgcgtacgcgtccctcgtcgcccttcactcggcagcctcttcatagctgcaggtgggtagg

SEQ ID NO: 5574 - DNA, 716 bp, Zea mays
  misc_feature (689)..(690): n is a, c, g, or t
  misc_feature (701)..(702): n is a, c, g, or t
  misc_feature (704)..(713): n is a, c, g, or t
ctgatggcactggcttgccatagggaacgataacatccctccacttcacacactctgaccgtctgatgacagtggcacagtttgcctaagcctttggtcgaatcgaatgcttccctcttcgagatttgtccatgtactacagcaacaagcatcaatggcaaactgccacgagatcataaacatggacaattccctcaagtagcagacataaaaaataaactggaagcaagaaatcgatgttgttttcccaaccgttttgtccattttatttatttatttatttcttatttatctttcatccagatgagaggaggaagaataggattacctcgagaagaaaccagcatgtcaaggattgtagttgggagggaggagggagacgcttgaattggttggtctggtatggttacctgggtgagcagcaggagctcctccactccgaaggagcgtgcggcggcgagcgtgtcgagcgcgaggtcgacgacggcgtagtgtgcgtgcctgcatgcgcgctcaccgccgcccgggtgccgctgtataggaaccagatcagtagcaggaagacctcgtagctgacggagttgacaggaatgactgtgtccagtgctgtgtggggagaagaagaacccggactggtagcgcgggctgaggcagtccaacagcagcgcgccgggcccgacgtcggcctnntcggcgacgannannnnnnnnnnccc

SEQ ID NO: 5575 - DNA, 1322 bp, Zea mays
  misc_feature (43)..(44): n is a, c, g, or t
  misc_feature (1253)..(1254): n is a, c, g, or t
  misc_feature (1268)..(1268): n is a, c, g, or t
  misc_feature (1314)..(1316): n is a, c, g, or t
ggaactcagatatccctgttgattttgacaatgaccaaacatnnggacaaaaataagaagggtaaagattccagatcaatgaagctttttaagagtgctattgcagattttgttaaggaagttcttaaaccatcatggaggcagggtaacatgagcaaagaggctttcaaaactattgtcaggaaaacagttgataaggtttccggttcagttcctagcagtcatattccaaaaacacctgccaagattaaacattatgtacaatcctcccaaaggaaggtgaccaaattagtaatggtatgtctattgtcacatatctagaatattggttattttcatacgtattttgtccatatgtttgtagcattctgtgactacacgttatgcaatagtcctgttcatggcatatgatctgttcagcacctgaacatcatggagaagtataaattatgccatttgccatgcccttgatactaagaaacacaagctgcaattagttggtgtcatgctattgagctcctgaactttgatgtcctgattcctgaagtttgtgctatgttgtcatccagccaatttgataattgttagtggagtttggcaacatatctttatgttcattagaggctgaaaaccctaaccctaacagggttggatgatatatttataatagagttgttgggcctaagcccattacagacagcccattacaatacaatcactatagctctaacaatgtttttacgtgaaatctccattttggtaatgtcacttactcacttaattgagtatattatctacatttatcttgtttggtcatcatatggcaataatttgtttcatcacttggactgacatcttgatttaagtttctgaattccatcgtgggattcaaaatctgtctggaaaaataggctccacataagtggatggcatacatgtcaagttagaaatgtttgaagctatctgatcctgtgcatgcgagttttgagctcacataattttttctggaacgagaaaacattgtatcacactgtttgcatatgtcaagttagaaatgtttgaagctatctgatcctgtgcatgcgagttttgagctcacatatttttttctggaacgagaaaacattgtataacactgtttgcataagaaaatgtgattcagccctcaaatctgatatttccaaatcgatggtatcatattctcctttagttctctacggtgacattttttgttcagcacatgtttgtttcanntaaatatctggctncattgacctcttttatttttttcaggggtatgtcgacaagtaggannncataga

SEQ ID NO: 5576 - DNA, 390 bp, Zea mays
attcttatttggaaaaacatatatggaattccctatcaacaacttaataaaaggatctgatctttttgacaccattgtggcctactgtagcttttcatagtaaatagtaacattttgcagatctttctcttataacttgatgatagaacttattaaagacatgaatctattcaaacggttctccagaatttgacttttgctgcatggcttgggttttggttctgactatgaactaaagcgtgaaatacagattctgcagtattattctcctaacaaatctgtattctgttatctccatatcatatatactgcagaacttggaaggagatccaagctgatgcggcctgtgtggatttgagggttcgttgcccgtacttttatgagctagga

SEQ ID NO: 5577 - DNA, 485 bp, Zea mays
agcactcaaaacttaaaagggcttcctgacgatgatgaatttgtcttttcttgtttcaccttgaaagcttctccgcagcaagggtagcttggcaggatgctggtgggttctcgtcttatttcagtgggtatggccgtttctatacgttgaacaccttacatctaacacctaatgccataaacctgtaattagtcctaacctggtttctttgaaccacgtcgccattccagagccggttcggaagcgctttgctacgacttgtttctccgacgggcatgctgttcaacaaaaacttcaaccaggtcgagtacattgaggcaaaaacgacatgaagatgcactgtacccatcacaagaggtgggatgatgaagatgtagaaaatgaggcacagaaacctggaaagatgaatagatgcaaaaggattcgcaaaaaccatgggaagatcatttgggcaaatcacttccgtccagaaggggatcagagtt

SEQ ID NO: 5578 - DNA, 657 bp, Zea mays
  misc_feature (365)..(375): n is a, c, g, or t
  misc_feature (377)..(382): n is a, c, g, or t
  misc_feature (388)..(388): n is a, c, g, or t
  misc_feature (393)..(397): n is a, c, g, or t
  misc_feature (399)..(399): n is a, c, g, or t
  misc_feature (402)..(417): n is a, c, g, or t
  misc_feature (431)..(432): n is a, c, g, or t
  misc_feature (461)..(466): n is a, c, g, or t
  misc_feature (477)..(477): n is a, c, g, or t
  misc_feature (482)..(495): n is a, c, g, or t
  misc_feature (497)..(497): n is a, c, g, or t
  misc_feature (499)..(505): n is a, c, g, or t
  misc_feature (539)..(541): n is a, c, g, or t
  misc_feature (543)..(551): n is a, c, g, or t
  misc_feature (554)..(555): n is a, c, g, or t
  misc_feature (557)..(562): n is a, c, g, or t
  misc_feature (565)..(567): n is a, c, g, or t
  misc_feature (570)..(587): n is a, c, g, or t
  misc_feature (592)..(592): n is a, c, g, or t
  misc_feature (594)..(594): n is a, c, g, or t
  misc_feature (596)..(596): n is a, c, g, or t
  misc_feature (599)..(601): n is a, c, g, or t
  misc_feature (605)..(616): n is a, c, g, or t
  misc_feature (623)..(625): n is a, c, g, or t
  misc_feature (630)..(630): n is a, c, g, or t
  misc_feature (632)..(634): n is a, c, g, or t
agctgaatctggctcgataatcgcaagaactgcgaagtcgacgagagtttcgtgacttacgcattttatcgagcaccctaatgagcctcgcactaacatattaatttattcaactatcaaactatactgaataatttatcagcttaccgtttccacagccaacatgaatccacgagatcggtagcgattttctgattcaggtaatttgtcgagcgcttggggaatatcgcgctgctagcttcgtcttcatccgatccttgggattccttgatgacgcacggaataacgacgatcttcgattgaagtcttcgaccgagtacttgataagcgatgcacagggaccttgcttatttttgtctaaagcnnnnnnnnnnngnnnnnnaaagtncgagnnnnngnggnnnnnnnnnnnnnnnngatgaagacgaagnnagcagcgcgatattccccaagcactcgannnnnnacctgaatcanaaaannnnnnnnnnnnnngnannnnnnntgggtgtggaaacggtgagctgataaattattcnnnannnnnnnnnagnngnnnnnnttnnnatnnnnnnnnnnnnnnnnnntaagngngntcnnnaaannnnnnnnnnnngaaactnnngtcgncnnngcagttcttgcgatttatcgagc

SEQ ID NO: 5579 - DNA, 421 bp, Zea mays
catgatgaagcctaaggccaagcagatgctgtccctggactgggtgccgctcgtgctgcacgtactggagtgcggcgacgaggtgcagtctctgttctccgtaagatgcgcccccaagatcgccgcgttctatttcctggaccagctgctcatggggttcgacgttgacagaaacgtcgagaacgcgaagcagatgatcgctctcggtgggctggacctcctgatcggcaggcttggcgctggcgacgctcgcgagagcaggcactgcatcgctctcctgaccacgtgcgttcaggccgatggcagctgcaggcactacttggctgatagtctcaagaaggagcctctcgttcagcttcttgctggaaatcagaggaaagccagtgccgcgtcccttaacctgatgagtgaactcgtctgc

SEQ ID NO: 5580 - DNA, 853 bp, Zea mays
tggtgaagcgggctactgctacacaatcaactatttcagcagataaaattgctccaacagtcactcctggaagccttaagcttccgaatggtgtagcaaaacccacctcagctcctttagctgatttgcttgatttcagttctgatggtgccccagcttccaccgttgcttctactacaacacctaatgattttttgcaagatcttctgggtattggtggagttagttcatcaacgacaggtattctttttcctggtgtctctgttctttcatgtgcagttcccatgttagcttgatcctcttattacactgagagcaagagggctttattgacatccctccgtctgcccccgccccaccctgcctctcagaatatgcactttttaccttgtctgaagtttgagttcgctgcatgctcagtgatttgctaattagccatttgccttcctgtccttaaatttacttctagtgctataatacgggtccaaatttttgtatgtaatctcattacttgttatttttaacccactaaaaagtctttattgagtgcttcatttttaccttttgggcactgatgttattatcataaaatttccttgctttagcaatatcaaatctctgttttgttcaggtgtaacttcaaccgcaagcacagatattcttatggatcttctgtccattggatcatctccatcacagaatggcacccccgtaacagacttccgtcatcctggacaaggtaaaagtgattttagcaatttgctgtatttctgtttatgagttatgactgttgttgatttttgttatactgatgtagcagagtctaaacctgttcctggtgtacctgaagctg

SEQ ID NO: 5581 - DNA, 500 bp, Zea mays
gccgaggcggccaagagggccgccgccgccgccagaggcgacacgaaggtaaatatataggcgtgcgtaatcctccattctgcctagaacgttgctggattatgatattcgtgttcgtcacttatatgtatacgtgcccttgtcgggtttttttttgtttttgccagaatggtgaggaggctcatccgagctgattgatcatcgcaaaatcagaccggtgctcccgtgaatcctgtgatgctgtactactgatgacacgtagatgcaaatagacgccgtcgtactaggtactactctgcatggagaggaacgtttgctctcttttgcaactctgctcgtcgtgtcgtgtgtaatcccatccctgtcacggttgtgaacttcgcttgtagctagcgacggttttgccttgccttgtcccttgtcggtgcaactggagtggagtggaggcgtccttgagcctcttccatgtacataggttgtcaataataataatgaataaa

SEQ ID NO: 5582 - DNA, 355 bp, Zea mays
gatctccccttgacagttatattggttgattattacgactaggcactaggcactgcctgcctgcgtgcaggagcagtacaacgacgacgacggcgagtcggcgacttccctcccgcccggaaagctctcgtaatctaaaggaaaaggaaatgttggtaccatgttgtgctattctagcatgcatgacagcaatcgcaagcttcttccccggccactaacctctatgtacattttcagcgtgcaagatcattgtcgacagtagtatacataaaagtgtacacaatatactgaacaaacaaccaagacacaagtgaatgtaatttggcaaagtacagtaagatccatgcataaacaa

SEQ ID NO: 5583 - DNA, 660 bp, Zea mays
agagtggactgcctgatctcggtgacactgatccatcggtacgaattctctgaagcagcgctgagaccttttctgttctaacttctgaagcatcactcacgtcagttctctccaacttgtttccgcttctaaacaggtcatctatgtcagaccaggagacgaagtcgatctcgactcggtaatccaagagaccgtacgattaactgcgtccacgaaggtgaaacactggtcctgaactcctgattacagcctgcatgctagctaggttagccagtgacattactgattaatatgtaaacatcacatgtgcagagttcatgttcggagacctgcgagaagtctacagttgtatggcaatgtgtgcacttgctgctttcttaatttcagtcagtaatgtacagatcattgtcatgacactttttgtctctaattctacagatggtggtagccagaagaagaagacttccagccaaaggtggtcaaaacttcttgatctaaagaaaaccctggataaagcgcctaagtgaattacttagtatgcatcagtcaactgccaatgctgcatgcagagcaagagaatagtgctgtatcatgatgctggaatggaagtggcgacaacttgaacttgttcaaccaagatggaaggttggtggtttgtaa

SEQ ID NO: 5584 - DNA, 395 bp, Zea mays
taggaatctctgagcttgcgatattcccgacgaggacttccctgagataatgccgatgaggaagggggtgaacagatttgtcgtgagtaagaggaagacgccattggagaggagattaacatccccgcaatacagaaggaacctgccaatcgttagttctgaaacggacaaagatgccaactgaaaacagaggtatgattgcctgcataccacaatcttaactgtactgcgacgcaccattccatttttacaccaaggtattactctttgtgacgataagggagcaatcagaaacaagaatcatcaagaataatgctccaggaaagtttttgtacggtaaaaattatgtccgcaatgacctagggtttgctggattgtgttcgctacatgtacaa

SEQ ID NO: 5585 - DNA, 471 bp, Zea mays
aaacaacagcaacctctaccaatgtaatagaatgcaagcgaagcaagcatacatttgctgataaatttgctcctggtctaaaaacatcgcagcaaccgaaacaggaaagaaagaaaattagcagggaccatatttgaatcagatcattagcggcatgatgcaacactcgcgttgcgcacaaggtaatctggaaatgctctgaatggttggtttgttggttcttgccttcacttcttgtgcgccctgtagtctggggagttgtggggcaatggggacaatggatgccttgaagaatctgcacagccgaaatcaagagccctgccagctgtgttgccatccctcaagctagacgacttgcgcttgttctgcaacaagaatcattcatcgcatcatcccatcacaattagcttcctcttagcccgcgacagagtttatcaatttaccttggtggatgtactggcagattttctt

SEQ ID NO: 5586 - DNA, 640 bp, Zea mays
attgcatttagagacaaggattttaagactgcaattgactactactccaaggtatcaacatccctgttctccattcatgcgtaattatggtaggaaacttatcacagaaagagtcatccgatgtaactgtcaaactggtcacaagtcaatgtttctaagcggttgggcccttgccctgttaggctgttagctcaagtacttggcaacacatgctacacaaatttacttccttactcttgatcaagacacccccaaaacattgtatttgtagcttatatgacagagcctgtttgctctaatgcagctagttgcgatgatgtcgacgccttcagctacagtttttgtcaggcgcagtttttcctacttgatgaatgggcaagcagagctcgctctacgggacgccatgcaagcccaggtctgcatgcccgagtggcctacggccttctacctccaggccctggctctttcaaagctcggcatggaaaccgatgcccaggacatgctcaacgatggcgccacgtttgaggccaagaagcagaacggctggcgcagttaggagccgacgacgaacaaagtctctcttccaacgactccgtgccgttgccctttgagagaaaaaggtacaatggcgagtctcctc

SEQ ID NO: 5587 - DNA, 1097 bp, Zea mays
  misc_feature (1080)..(1081): n is a, c, g, or t
gcactgcacaggatcaggtatagttaaggcaatcgatcttgtagtggatatacttttttagtcatgttgcacttgttattcataagatggatttgatttgttaagtgcctttggttttcagcgaaggaccttcttgtaacatattaactgcttttgcaggaagtatcttgtagaggccacaaaagaagcatccaattcttataatgaagcggtaagatacatgattttgcttcttgaaatatttccaatgtctggttgtatgaacagccaagaaaaagctctcaaattggtggctacaactcacgaagagtagaactgtacaaatcttaagagccaatgcctagcagctactttttagtgaaaaaacaactaactgataccttgaggctgtatgaagtagttagcatcaagttataattaatcatttatgactaagcaaagtcctgcttaggaaggttaaatgtgcaaacatgtgacaacctatgattttaatgttaacctgctgcagtaggcaatttaacctgatgtagagtttattccagttgcataaacaataaccagacatatggtattctgtattttttcatttttaactacatgtctggagaaagaacggtgccatactgccatctcaaggaatattccgtctgaaaagaactcatggaacccaatgttccgccagctaactgtttgctctgatgattgttcttggtgtcaggtttcgcggttgcgtgagtaccagggtgtagatccacggttcgatgtgattgcgaggcagtaccacgagattgtaaaggtaatctggctcagtgttgctgccactagtttaccgtatgtttttacttgctaagttgctaaccctggtcgagcttcatcagaaactggagggcatgcagtggacaattcaccaggtggagatggacctgaaacctcaccatgaccacgcagctgtttaagtccacatctgttggaggccatgtttattacctgaatgcagcgggtgcgagttaggggggttgcagtggatttgatttgaatcagagggtttctgtttgtgcatgtttttttttgtgtatatcnnatgttggataatagca

SEQ ID NO: 5588 - DNA, 706 bp, Zea mays
  misc_feature (698)..(698): n is a, c, g, or t
  misc_feature (700)..(703): n is a, c, g, or t
atgccgtccaccgtgaactccgcgtccctcgaccagaaccttgagctcgccaagcaatgctcgcgaggtatacatacagatcaatcgatccgtgtttactgatgcttgcttgagcacataattaatcatgtctgcctgctgcagaggccgccctcgcagggttcaaggcagcagctgtcgcgaccgtcgcctctgcagttcccaccgtcagtgttcttcatctgtctcagcatgtaaacctcgctctaataatcctcgtcgcctgtatgtgattcgatcgatatctcccctgttgttgtttcagctggctagcgtcaggatgctgccatgggccaaggccaacatcaaccccgctggccaggccctcatcgtctccacaggtcgatctctgaatctctccccctgatccctctacgacgacctagctagctatttgctaccaagatgccttcacatgtctttctgtgtgtaactaacggcggaatgcctgctttaatttgctccacgaaaactgggtcgtcgtgcagttgctggcatggcgtacttcatcgcggcggacaagaagatcctctcgctggcgaggcagcactcgtacgagaacgcgccggagcacctcaaggacacctccttccagggcaccggccgtccgcacccagggttcttcaggccttgagcgagagaccatcaaactaccgccncnnnncta

SEQ ID NO: 5589 - DNA, 339 bp, Zea mays
aaaggcagctagctgtgttgctgtctgcatcgccatggcctgaggcgcaccgacgtcgctcgcggatgcatgcatgcgtggaggagcgccctgccgttgccggggttgttgtatctggctggatatacgactggctgggctgacttatatatttagatgatgaatgaatggtcgcttgaccgctgctggttcagttcgtatgagattttgtaccatggaaggccttcacagcagcatagcatgcttggtcgctgcttccttgttgttttgcaggcctgggtttttattcattgcttccatgattgatgtatgtatgaatgaactcaaactatttgtagg

SEQ ID NO: 5590 - DNA, 1551 bp, Zea mays
  misc_feature (1545)..(1547): n is a, c, g, or t
tataacttgtgtgggaagttctggaaggtggccttaagagtaagatatagattcaatggtcagatattactgctttgaaggcaacttgccccgaaaatggccaaggaaccttggacgtggtggtacgtttatctggaagatgtttgtttcttttttctttttagttcgctacctctgtttcgattctgaggcgttctccttttcctgaagttggccagaccacctcttttctttaaagagacagatccacagccaagaaaacacacactgtggcaggctacctcagatttcactggtggtcaagcgagtgtgcacaggtactataatcgttgagggctcgtaattgaaatggatctcatatgagaagattgctcctatatatctggcagtatctcatacacatagtactgttggagtataaagcatagcttatctgctttacatttagatgttctggtggcattcaagatatttactatgtttatctggggttctgtagtactagcacggcatgttttttgctttatcgctccatttttgttggctctggttgcattccgaagatatttatgatgcttacctgggattctgtagcactaagtttctggctcatgtttgttattagaacagattgccccttttgggagcagttaggtactgtaggacacatttttaaattgtttgttttagttgtattgctaagggataaattctttagttgtggatcactttgacttgagttgtatcatatctagatccaatctgcttaggagccacttataaatctattaacataaggagacattatcactgtttcaagtaaaaaaaaagaaagattttgtctttctatcctttatgttctgtcactgattatatggccacgtactatgtacagttactgatgcacttatgtgcatcataggacctcatccagtcttcctcaggacatttaactatttgccatctttacggatgacactaaataaccagtcactgacatggcattttgtttgccatccacctcgtaaagatggcaaaaaataggctatctccagcaggtttgtgtatatgggcgtgcaaagtaccgttttgcactgtagaccgcactgtttacaaagtggagttttaaatagacagtgggatagagaggctgctggagatagccttgttagattgtccttcttctctgggctctaaaataatccatatagactttcacaccgcataaggggaagggaaaaggtatgttggcatgcattcaaatgtagcttttcagaaccaggtacctatttagtaaaaatatggtccatggtattatctatgacactgaactttgattataagtttataacagagtggtatcgtctactactcagaactttggtttataacagagcaccatttatactagttgagcctctactcctttgttcagtattctgattattcaaaagtttgcaggcggcattttctgcagtgcccttcaaccttgttgagcaagaattttgagaagcttattcagtgtgatcagcggctatatcaatnnngagc

SEQ ID NO: 5591 - DNA, 403 bp, Zea mays
  misc_feature (7)..(7): n is a, c, g, or t
tggaganatactgtctccaaactcattggatcacctccaggttatgttgggtacactgagggaggccaactaactgaagcagtccgtcgccgcccgtacacagttgttctctttgatgagattgagaaggcacatcctgatgttttcaacatgatgcttcagatattagaagatgggcgattaactgatagcaaggggcgcacagttgatttcaagaacacactattgatcatgacatctaatgtgggaagcagtgtcattgagaagggaggtcgcaagattgggttcgaccttgattatgatgagaaagacaccagctataacaggatcaagagcctggtgactgaggagttgaagcagtacttccggccagagttcttgaacagattggataatcagcttt

SEQ ID NO: 5592 - DNA, 516 bp, Zea mays
gctacctacacgttggcggtgctggctgatgggctcgtcacggacaaccctgccactgcagcttcctacttcagtgagtatctgatagcctgataggcagctatcacacgctgaactgaaaattacagatgcagcatatatcattttgttttcagacaaaatgcctttttttacaactagacgcaaaactttgaatcattactgtttgtgaactgcagggagtccatgcagtgacatgaagctgaacctgagctacacgatcctgcctgcacaacctggcgctctggtcaacctggcatccccgggggcgctggctccggcgggagcgccggcaccgttgctccaacccgctgacgttgtggacccgccgctgcctccagttaaagctgtgatcgccgccgacgcgccggcgccaggggcggctgacaacacctcctcggcgttcagctccagcgcggggaacggcctcttgtgggctggcatcgctgccctcttgtccctgacctttctgcactg

SEQ ID NO: 5593 - DNA, 647 bp, Zea mays
tgcagagctactccgtgacgcactggtctgccctgctccggagaggaagagaggttctcaacgtggccggccggttggccccgacccaggtctgcgtccttcgtcgcgcgttgcttgcatatttccgctccttcgtcatcttcttctccttcttcttcttcagtgttctgacctgcaaatattgcttacctgctgtgcagaacgtgaagggggctggaccgttgtcgagggttcagatcagcgccatggctgtgaaggacaacctcatggtggccggtggcttccagggagaactcatatgcaaggtatctctcgtcggtgttttcccttctcttctgtcagttttacaaggtctatctctcactctcctgcctgcgcgcgcatgcattcactcgttcgtcagtacgttgatagacccggggtggcattctgcaccaacctgaccggcggcagcagttccatcacgaacgccgtcgacatctaccaggcacccaggtaagcgatccagaccgtcatgttctgataacagacaactgagctgttctgttgtgaaccacgaccgacggtatgatgatgcagcggcgccacgcgagtgatggcggcgaacaacgactgcgtcgtcaggacgttcgacgccgagagataca

SEQ ID NO: 5594 - DNA, 356 bp, Zea mays
tctggcctatggcatgcgtgccccggttccaggagccgtagtacctggtgctccagtaaacattgctccgatgccctatccaatgccacccccaccatctcatgggtgacagggtgagggacacatttcaaatgctgtgtagcgtctaaacaaacccataatctccccctatgccagcattttgcgggtgtgctgctatgtctcaataaagcaatgccaataaacccttgtacattacaaactgttgttacatgttgcattgaggacattgcagattgtgtactttgtgttgcatgcaaactttttcatgtacatctccaaaatccaagtgtttctcgttatggcagcttgtactt

SEQ ID NO: 5595 - DNA, 200 bp, Zea mays
  misc_feature (187)..(187): n is a, c, g, or t
gcttggtattgaccctccgaaggtgtcctttgctatggcccacctggtactggcaagacacttcttgcaagagctgtagcaaaccggactgatgcttgtttcatccgtgtaattggaagtgagctagttcagaagtatgttggagaaggtgctcggatggtcagggaactgttccaggtatatctangtctgtgaatccg

SEQ ID NO: 5596 - DNA, 162 bp, Zea mays
agaactcatctcatccagaactcacaattgagggtcgaatagcagggatctgggtaggtaggcgaatgaacatgcctgagttcacgggacatgcaactctgaacaagtgatcggagttgcttctccctcgagtcgagagcctggacgacgacttgtggttgt

SEQ ID NO: 5597 - DNA, 761 bp, Zea mays
  misc_feature (753)..(758): n is a, c, g, or t
caagcctaactaggaatcgtcctacctcgatcaaggcacagatctatataaacaaactaaaatgaagctgaaaaaccgctggcagctttgttgatgccaagaccttgatcaatcctcaattcgtggctcatcaattcgtgccacggtgagagaggagtctgtcagtggcggcgacgtggatcaggacaggaggacaccgcggcaactgacaggtaggaccgtaggacacggcaccgccgccgcttcgtcctttctggcctcctccagatccctgatgaattggctacgctgggtgtgacgacgcattcgctgcatcgtgatcatagaaattagaaagtgagaatatactcagtacaaaactttacatctaaactacgggctgagctttacatctcatatttactcctgataggctgatactcctacattatatccatacattttctaccctaatgcctattttttacaatttcccaccaaaacaccagtctgtactattacttgaccaccgttgttagaaagaatggacaattaacatgaaaaaacaaaagaaagaatggagttagcgtcagtgttagcacctctttacagcagtcagaagttagcactggaccctgatggacgatatggataaaaaaagaagccggcattctccagtgagagtcctgtaataataaactagttagtaatttgaagaaaacgatttcgatgtgttggaagagatgccagcacaaaataccgcagctggtatcnnnnnnaag

SEQ ID NO: 5598 - DNA, 384 bp, Zea mays
gaaaacaatttgaaggagctgtaactagctgtatctcatcatgctccttacatcttacctgccgtcttgtttgtaactagttgactgtttggtcatgagcagttactgaatcgatgtgtagacagccctgcaaatgctcacgagtcaacgataaacatggtggccttgtgtcttggcaactggtgtttgcagcaggcggaccagcagctgtctgctactaatatggatccgttgattttgttgtattattctttcgactggaaggtatcataagtcaattaggaggtgattcttatatgtattcgttatgctgcaaaagtgaaggtgacaatttttttggtttattggcaagtacatggaatttacatttttgttgagatggtc

SEQ ID NO: 5599 - DNA, 898 bp, Zea mays
attgttttgcttcacatcaaatacatacacctcatttttagatgtagttatcacaagtgtgttctttttggggcaaaaaccaccagatgtaacagaaccaccgttcattcgggatatgaaccagtgttgcctgcaaatatagtgcgaaaaattgtgataacagatatatgtcatttacatctactgcaggcaacaaaaaaaaagtgtatgcaacaccagttggaaagtatcaaattggcgcttacctttgcacctcaagattaaatacataaatatcgccatagcagttaactgcagccagccattgcccatctgcacttaggaacatcttcgttataggtgattctcttgagatttttactccatctgcctttcttgtagggtgaaatacatttgaaatttctcttgttgcaatgtcaatgatctgaacaatgtagaacaaataaggagtacgaaatgttaaacaataataatatgcaacaggaagacatctttaaaaacaatgattttggcatagttacttgtctgatcatgatcttataatataatgactaaaccacaatgaaaaccaataccccgccaaacacctaatagcttactacataactagatgttcaaaatacaagtacttctaatcatgtaactaacagacattggcctaccagtaggtagaatcacagggacaatttcatgtctcagtaactacatgtgtggaactgctgatttcaaatgtaagacaggtaaaattttaaaatagaattggatatatggcaccctggcatgtcctgcttcctctagcagaaacactacaaatattttcatacaacatcataagatagaagagctaaaatacatggcaggtgacttacgtatatttttccattacgccccgcaagta

SEQ ID NO: 5600 - DNA, 1039 bp, Zea mays
gtttagaacttaccatatgacactgttattaacacctaagattagagaatatttctgtcattttttggtgattaaaaaaaattgtccatctaatttcagtccttacaagaactccacaaatggatgtgatcaaaccagcacaaaactccacaaatcttagattttgcatctttggtagcatcattggttactccataccggtatagctaaacatggcaatccctgccaacatgcaaaaatctgaagcagggtgaattttgaattttgatcttgagctattgttgaatgtctcttacaaaatgtgtagaaatgctattatggcatttaactaggttggtaagctgcctaaatacatataggcaggatatttcaatgtttgtttgtttagaaatttgaatttgaagtgacatgaggtgtaagattacagatttcgccagcaaacaacaatggctagtcttttaatattatatttactggcctttaatttgtccccatatcattgcatctgacagcatctttcacatgattttattatagtcagtttttaacatcccattaaaattctctcccattccatcagattttacagtaatcctagaatgattattcagtagtgtattctgattttttggactttgtaggtgttgacatcagcatgaatactcatctgaagactgtgaagctgacactaaaagggaaaaatcctgttacccttgatcaccttagtgtgaggggaaacaacatccgctattatatccttcctgacagcctaaacctggagactttgctggttgaggaaacaccaagggtcaagcctaagaagcctacttctggtcagagttctttttctcccatttcaaccttcgagatttaccacctgctagcattatcatttcatccatcttcatcaaaaaccagggaagcccttgggccgtgggcgtggccgtggtcgtgggcgcggtcggggtcggggacgttgagcatgctagctgcttttggaaattgcattgcgtgcatctgcagtgtaatctacatccta

SEQ ID NO: 5601 - DNA, 978 bp, Zea mays
aaagaagaaggaaaaaccagcaaaagttgaggttggcaatcatgtgcaccattcatgtttaaagtagtgcagtttgatttgttggaccacttagttatggtttccctaaaatgcaggagaaaaaagttgcagttgccactgctgccccaccatctgaggaggaattgaacccgtacactatatttccccaaccagaggaaaacttcaaggtatgcttgctccactattctctgacatacaagtcgtagttttggcactcaggcacattgaccagttcattgatttgtttgtttttccatcataataagttttcttcagtgatcctgatatctttttatgatctaggttcatacagaaatatttttcagtgatgggaacatatggagagcgcataacacaaaggaaattttagaaaaacatcttaaagcaactggaggaaaagtgatgacccgttttccaccagaacctaatggatatcttcatattggtcatgccaaggttttgataattttcttcttgaatgcatttccttgcacaaaattttaaaattgatatatatgcttacatgcttcatcacacaggctatgtttattgattttggtctggctaaggagcgaaatggccattgctaccttaggtaatacaattttatttgcgaatggtttgctctaactaacatacatttctacaagcattcatggctgttaatgctgctttaggttactcttctgtgcaattatagtgcaaaataaattagaagagttttcttttcatctttgtttccttctaaccttatgttgtagatctttgaaaattttgcctgtctttttatatgatatttatttactcctacattgctgtgagacttgtggtttgttttgcttgatttgttttaagacattgtaattgcttcagttctttttctttaccatttgtttatttgaataacagatttgatgacacaaatccagaagcgaa

SEQ ID NO: 5602 - DNA, 369 bp, Zea mays
atctaacgtgttctcagactccaaagttagagccctctccccagggttctacatcggaagcaccttgatccgtgtcctgcctcatgtgtacgatgtgttcaggagacagcactttgttccaagcctgagaccatcttacatgtatgcaggccctcgtgacgacctcttcagcctcgcttgggacatcgtcataccttgcggagcactgctactgtcggcgctcctcttcttccagcagtggcgcggaggagctttcttcctctgttcgaagaacaggaggacgagagagtacgaaatggtttccgtggccagctcttaagaaaaatcgagtggatatgaaatgcttttatagccggttcttgacatcgt

SEQ ID NO: 5603 - DNA, 726 bp, Zea mays
  misc_feature (719)..(721): n is a, c, g, or t
agaggaggttgacaaggttcttgcttcagtagcaggggagactgcctcccagctaccagatgctgccagaacacagaagatacatgaggcttcaacaagcagggttccagaagaggtaactaactaacctccccttaacttcgcttgcttgcttgcatgtatgtgaacattgaacggtgcaaaggagaaatatgcctttcaagaagctattggatgcaaagtggattttggtaaataaacatgtcattgactgctgtagtgctgtatgtgttttttttgagggaatgactgctggatgatcagtgtggaaactgtataccagtttaagtattgatgctctcgatagtatgtttggtcacaagcgattgatgcggctgtttgactttattttcatcgtggattccatgactctggttgtaataacatttgtctttatatttcttttgcagcgacaagctgttgcagagggtgctgatgacgacgaggaagacctagaagagatcagggcacggcttgctaaagtgaggtcgtaaatcatatacatatctgagctttctaacctggggagcccatggctcacaaaatatggtgccaaaacccgtgtattgtgaactgagtcgatgacaatgcaaatttttttaattggccctcgagtcgaccatatatgaagtggcagtctattgttgtacaacgctacgagagtggcatggaatatcgannnatggg

SEQ ID NO: 5604 - DNA, 529 bp, Zea mays
gaagccaagcacataaacaaatctctgtcagcacttggtgatgttatatctgcacttgcccaaaagagttcccatgttccatatagaaatagcaagttaacacaagtgctgcaggatgccttaggtattgttaaaagcccttgtattgttggagatgctgttgtcaatatactgttctaaccacttgtttccctgcaatacaggtggtcaagcaaaaacattgatgtttgtgcatgtgaaccctgaaacagactcttttagtgaaacaatgagcactctcaaattcgctgagcgtgtagctacaatagaacttggtgccgcccgtgcaaacaaggaagcaggccaggtcaaagacctaaaggaagaggtatgacgttgttttatgataattaccaaaggccaggttaaactttgatctcataactcatagtataagaattatatttgtcagatcgccaagcttaaattggcattagatgaaaaggaaaatgaagtggcacagtttaaagatcttgctaaccgtgtgact

SEQ ID NO: 5605 - DNA, 722 bp, Zea mays
  misc_feature (157)..(157): n is a, c, g, or t
  misc_feature (159)..(159): n is a, c, g, or t
  misc_feature (170)..(171): n is a, c, g, or t
  misc_feature (173)..(175): n is a, c, g, or t
gcgatcataagcggggcttctgcccccgccgtagcgatcatatacagggcttcgcctttcatacattgctccatcacggcgaccatagccaggataacgtccacgccgaccataatctggaccgtagtcccttcggtaccttgggctaggtgagcgnantttgtagtganncnnnaatatgccttccgggatgatgacggcgatagagatgaccgatacgacatccccaaacaaggtgcttatgacaggcgtggtggtagcccctacatgcgctcacctagcccaaggtaccgaagggactacggtccagattatggtcggcgtggacgttatcctggctatggtcgccgtgatggagcaatgtatgaaaggcgaagccctgtatatgatcgctacggcgggggcagaagccccgcttatgatcgctatgacaggaggagaagccccggttatgatcaatactaggtaaggcggagttacatgctttacgaccatagagtcaatacactgaagtgcaaagattacttattcgttttcagtggcatgacttgagtttattatcagcttgctaacatgattctcaatcatgttttgtagtccggtcgattctgaggaacccagtaaagaagtagtttccaaggaagaggtggcgagcaacaacatgatttttgccacgccaagtatacctggaggagccgtggtgtcccaagtatgtctgagtg

SEQ ID NO: 5606 - DNA, 387 bp, Zea mays
aattaacgtatttctcaaccagtcatgctaggtatgctaggtgcagaagaaccatctaaatagcatcagaccattatattgttagaaaatggaagatgactcacaaacttctaagaaaatactgaaaacaatgttttaaaaacaaaatacaaggaaaaaacctaggagaaacaaggtaccatggacaaatatttcattttagaggccatctacaatcaaaaaaatacaaacgaaaaaatacacgagtttcaatttttccatatcaattcaagtaagaaacacttattatttatgatgctagttggccaatgtcataaaaacatacctcattagccagtccaaataatacatggtatgctgctctatctttaagcaacttgaccctct

SEQ ID NO: 5607 - DNA, 529 bp, Zea mays
cgtcatcgatgacaagatcctctgcatgcacggcgggctctccccggacctggacaacctcaaccggatcagggagatccagcgccccgtcgacgtccccgaccagggcctcctctgcgacctcctgtggtccgacccggaccgcgacagctccggatggggcgacaacgaccgcggcgtctccttcaccttcggcgccgacaaggtcaccgagttcttaaacaagcacgacctcgacctcgtctgccgcgcccaccaggcaagcctccctgctcctgtgtcctgcactcctgcttgcccatgtgcttccacaaccagcctgacagatcgactcacagttcatttcttgcgatggcaaattggcaatgccattgtgccaacaacaggtcgtggaggacggctacgagttcttcgccgaccggcagctggtgaccatattctcggcgcccaactactgcggcgagttcaacaacgccggcgcgctgatgaacgtcgacgccagcctgctctgctcgttccagatcctcaa

SEQ ID NO: 5608 - DNA, 475 bp, Zea mays
cttcgcaaggtgaggtttctattgtctcaaggatggtacctgcacttgtcaaacataaaagctcgctacctattttatttagacacaattaaggcaataaggcttactggagtttctgcatactcaagggttcatgggcatcccagactcccagcaatggaatctgcaaggtatggctcattcgaaccatatgtggagaagtttaattccttattagtgagaggagaagatagaaaatgtagaatagttgtatagtgtttcaaaggcgttgcctacgcacgtccggccgtccaggtatctccagctcgctacctatttttgccattatggaatctgcaaggtatggctccacattgatacagttgatggtttgtctgcatatctagcaagtgtgcaggaggatgttgcatcagttatcattggtaaaaaaactatattgcatgcgcggactgcctctgatgctattgatatgagg

SEQ ID NO: 5609 - DNA, 366 bp, Zea mays
cagtagcatagtaaccctggtacctatatcatcatcgtgtagtttaattttttccagtgcgtttaggcggtttaatttgtatgagccaagtattactgtagcagttatatagaataaaacgtacatctggaaatgttcacagggctagatgagcccttttcttctgaagcaatcgacggtctccctgatggccacatcaaacggaaggaaacaaacgcccagatcgatcaacttcttggagggctcctttgctctcatcaaccaacctgtttgtcctccttgatagttgattctgatgtgaaaaaagtaaaaatgtcattaccaaaacgaacagctagccctgcttacacaaacctgatgcatgtt

SEQ ID NO: 5610 - DNA, 367 bp, Zea mays
actaggattggatgtcggcaaattttggcatgcagtatgcacaactgcccaagcctacaagctaatgtaaacgctacattcacatctgcttaaactatgccgcttcaacgctttgcgaggatcactagcgccagcatcgacatagaggcaatgaacctgaagccctggctctcccagaaattatccttgtttccatggcacatgctgttgggctgcttcatggccacctggtccatgagctccttgagagccttgtctcttttctcccccatctgcagaataaatgtaaacaggatcagaccattgatagaaatattgtccacgcacaatcacggccaactgcattagctgaggatggtcaggttca

SEQ ID NO: 5611 - DNA, 384 bp, Zea mays
gctgtggggagctggcgaatcgagcttcgtcttggggaaggtacgttcgtcaggtgctcgtggaaatgccgtaaagcatcgcgtctattttagccaggtgctagggtagacggaaggtttaagttacgacgatggtgtgtttttggatatttgaatatttgatattggttttaccaacgttttcaactagaaatagcatttcctctatttttttactgtactatctagtgctccgatgccatgttccgtgtttcagagtagcgtgtagggaagagacaaagacagacgactagtgaagcgctgctcttctcaaacgaagcaccgtttttagcattactagctttcaacagtggagcatttccatctgacatctgtatgtgatgc

SEQ ID NO: 5612 - DNA, 480 bp, Zea mays
  misc_feature (470)..(471): n is a, c, g, or t
gtttgtttgctgtaatctcctcaatgtttggtcgtctctcaagagcagggactacgttttccacgtgcttcaatttaattacccaactaacttcaatctgtcgcgcagggtgttcttggcatcaaggtgaagatcatgcttgactgggacccgaagggcaaggttggcccgatcactcctcttccggacctggtgaccatccacaccccgaaggacgaggacgagccgcgccctccggtcttggcacctcctgaggtgtaaggtcccaactgtgtccttgaaatggcagtttgatcgggtcctagataggtttctatcttacgataaggacaatgctaaggcagttggttaccttaatctttatggacagatgctatgtgttgcttctgtggcacttttgtttaagctaagttttgcggagacaagatacttatatatgttcccgatgaaattatggttccttgtatgtnntgggaaatt

SEQ ID NO: 5613 - DNA, 378 bp, Zea mays
tgagtcttgctgatgcattgacatcagaaaatatcagcatatttcgttttgatttttctggcaatggagaaagtgaaggcacttttgaatacggcaactactataaagaagtggacgatttacgtgatgtgatcctacatttcaaaaaacacaaacgtgacacccatgctattgctggccacagtaagggtgggaatgtggttatcctctatgcatccatatatcatgatatatctaaagttgttaacctgtctggaaggtttaagctggaacgtggtattgaagatcgttttggaaatgattacatggaaaagattgatcagcatggtttcattgatgtggaagacaaaacaggacgtatcatctaccgtgtgacaa

SEQ ID NO: 5614 - DNA, 694 bp, Zea mays
atctttgaaacctcaggtttgcctctttagtgctcttgaaaagttctcttgagaaaactgggttcaactagccttatagttatctctttattacatttcagcttagttcagaagcaaagaaagttctggtggagtcgtatgttacgcttcgtaggggggacagtactcctggaactagggttgcttataggatgacagttcggcaattggaagcattgattcggctgtcagaagctattgctcgaagccatttagaaagagttgtaagtatactaattcactttatcgtggatcatgttcgtcatgtaacactttgctatcttttatagaatcatggaatttattaagtcacttgccctttcatggacatatgatcaacctgtatttgttatcggaattttttttgatcggaagatcaacctgtattttgattttcatgctgcttgcgttgttatcgttgcccatttccattactttgtgactaacttcatttgatattcaaatcttttaggttctcccagctcatgtccgcctggcagttaaattgctcaagacatccatcatcaggtgattcagttgaactggtaacatttatgaattgatgtgtgcataatgatgccgctgatgctaatctcattgattttgtgtagtgttgagtcaagtgaagttgatctctctgacttccaagatgctg

SEQ ID NO: 5615 - DNA, 625 bp, Zea mays
tctgatttcattgattgtgctgagcacttgataaaaagcaagtactgctccagggaaaagctttgcattaatggcagaagcgcaggtggcttattgatgggtgctgtcctaaatatgaggcctgacttattcagggcagctgttgctggagtgccttttgttgatgttgtcacaactatgcttgatccaactatcccactgacaacagctgaatgggaggtatctatttcctcaaaattattccatgttcggtgtcgtatcgcaatttttattcttgccggttcttatgaatccatgtgtcgctgtccttggttcaggagtggggtgatccaagaaaagaagaattctattattacatgaaatcgtattctcctgttgacaatgtaagtgcagatctttatttgtaaattgaaatattgcatcaccctgtgtcatttgtttgtggacgccacaggtgatggcgcaagagtatcccaacattcttgtcactgcaggcttaaacggtatctgaaggcttaaacggcatttgtggttggtctgtggtagctagctgagtatctgactcggtgttgttggtgataacaaaccagatccacgcgtgatgtactctgagcctgcgaaataa

SEQ ID NO: 5616 - DNA, 498 bp, Zea mays
  misc_feature (480)..(481): n is a, c, g, or t
  misc_feature (491)..(491): n is a, c, g, or t
tcggcatcagcattcacattcatggcagtggaattcctaagggaccatttcaacgacaaggatgatgcggatgcccatgaagtaacctccctgtcaatggacacaaaatcagaagttgagaaatcagcttagggtttcttttcttatgatctatgaagtgtattggtatctgtatccctccccggtggaaattatccggcgggatctttctgtcttgggcaacaaactatgtttcggtcatgtaaatgcggaggacattcattggcagctgggcggagacattgttgtgtaccagaaagaaagtaattgacaacaacatgatcatattgtggcgggaaatttggatccataccattaaaagatcaccactttggatccataccattactatctcacttacatgtgggtcgacatgagtcaatgacatgtggggtccatggtatgtatttaaagtttggatcttttaatggtatagatccnnattgttcctnattgtgg

SEQ ID NO: 5617 - DNA, 625 bp, Zea mays
  misc_feature (616)..(618): n is a, c, g, or t
cctttatttgaatttagcttgttatttcatctcatttgtcctgttttggtcataaaacaataacatattagacatatactcttgcacttgcatgtacatgtataattgtatacacccccttccaatatcactatttagttcgtctattacttgcttcacacagacaggtgcttaatggtgtttatgtgctgccttgtgaccttttccttccaaagaaggaatttttaatgcatagattatgacttttttcaggttttggtgaccaacatgctgcttttggtgctcgtggtatgggtggattccagatgcctgaacctccaataacgcctggaccatttgctcctggattgtcacgcaatgaaggtacaatccctggcattggggttgcaatgaccttggcaggccagtcttttgatggatctgatggagagcagaggccatctattccgggtcttccacctgggcaacccccgctgccaccaggtcctcatccatcacttcttgggcagcaacaacagtatcaacagatacctcagcagcaacatccccagttttcgcagccaccacctccaaacatgccccaactgcaggcaccagctcacatgctttcacattnnncaaggat

SEQ ID NO: 5618 - DNA, 916 bp, Zea mays
ctcttcatccagtttcaaaggtttatctgcattattggttgatagaagaccagtaagagctactgtaactaagtatcacttgcaaaggctgggaattgcctgcgatgttgttgctaccattgaattggctcttggtgtgctgtccgggagaaatggcagttctctaaccaggtacttgtcttgcctacgtactctctaaaagttgaagtgattgagctaccatcttgaggacttaggaataacgtggcatacttggctgcttgggtacttaaattgcatgtgacttctcttcaaaattgatatttggtttgcaacgaatttgttgcatatgcacactgaatattgatcgcttcagaattgatattgccatcataaaatatttttatacatcctttgaccatccaactcatcaaatcactgttgtggtcaatactaatttcttcattatttttacacacacacacacaccaaattcatcgtgttaccaaattcaccgagttggatctgctttcagtttgtatcaccttttttagccgtagttctcattacggttcttgcgtattatttatctagttcaaactttgcttatgttaaataattaagtgaaaatgcggtttttgctctattaaactgtagaatgcaaatgcctactgaactactttctacatgcagtttcactaattgttacctgtatttctctcgacatgcattttctctcgttttccttgggtctaactatttttttttcctgaattcatcatgcagcacgaagcaaccatgcatgttattgattgagagtgattcatggggcttcaagattgatgtacctttacgatctcgactcctggagatgaagcagaatggtccacctggattgcccaaaactatccttctcgcagctgcagaatcgggcaaa

SEQ ID NO: 5619 - DNA, 818 bp, Zea mays
ctattgtgcacacgtttatgctgacttcctccaatttttgaggtctcacgaatttattttttgtgacttggcaggtaatgtatgatgcttctggtatcagactgcatgctggaaagcaagcagaggtacgtaataactctttgcgtgccatctgtactgttggttcaatagcctttctgtatcgttacaaccttgtgatagctctctatgtattatggtaacaatttgtgtggtgcttatgttgaacttaatttagttttctccgatcattaggtattgaatcaaatagtttgtgaacttccttctgaacaccccttgtctgagacaagaccactgcgagaacttttaggccatacaccaactcaggtttgttcacatgtcctttttattgtttttttcaagtgaatgcatttcattgttgttggcaaaacgaaagcgatgggttattggcattatagttatgtggacaccaagtgaacatcaaacgggccgaccccacatgcctctttttacttggcaacaatatgtagatatgcctatctactctatcaacatcattcagcttcgtcagcaccactatcttctcgtggcacacatttatgaactacctttttttatgttttactaatttcttgggtgtcaaattgctcccaggtggttgctggtgcattgcttgggtgtacaatagccacagcaggacaattattcctttgaactacgaaggtgcggcagaaatgttgtagcatttgtatcgcagggacttgagaagaagtttctccagtgttctgctactttaggtattggtaagatttgcatgt

SEQ ID NO: 5620 - DNA, 580 bp, Zea mays
ctggagggagaagattcaaatctgtgtttgacgtcaagaatgaattcaagtcaatgtttctgagctttgccagtgccaagaatgccgccatggagatcccacctgaaaactacctcattgtcacagtaaactcttggcactcaattgactaaccagcagtttgaacaacatttgttttgagaacaaaatgatggctaaattgtcttcttacatgtttgtaccagaaaaatggaaatgtgtgcctgggcattcttgatggaacggctgccaagctgagtttcaacgtaattggaggtacagagtgcagtcatacagtacaaaattctgagatttgggggcaatgcatctttggtgtactaatatgacttgacctttcttttgtagacatcacgatgcaggatcagatggtgatctatgacaacgagaaatcgcagctgggatgggcgcgtggggcatgcactaggagcgccaagtctattctgtcttcctttccctgagctcagttctatgtacttctgatagagtttaagaaaatcactatatcaaacctcctcgcaatgcatgaatttcctaactgaag

SEQ ID NO: 5621 - DNA, 460 bp, Zea mays
ctggttgagtcccgtgaatcagataaataagaacttatgggtcaggtgagggatattggttgcattcttttctttatgaagtgctgttgagatcaatatgtgttcgttatttacttgctcgttttatcttctgtttgtttttgcagaggaaagctgacggttcattccttgctgctgtgcttgagcagtggagggacatcgacaagccaaccatggggggtgcgtcagcgttactaaggctagctgctaagatcgacttggtgagaggagagattagaagtgatggggggggcgttagtcttgtaggctgagtagattttcagagtactgaagagcttgtagttctgccaggaacatgcttattagttgaagcaagagtgttgatggtccattgcttgttggattttgtggttttaatttgaagggcgcaaaaacatggctggatcagcttgacggaaga

SEQ ID NO: 5622 - DNA, 383 bp, Zea mays
tttcttgggctcgatctacttaaagcattcacacgagaaagaaataagcagaaccatcaggattgaatgcacctttcttgatgacggtgtactctaaattttgagaaggctgtagttccgttcttgtagggacatagaggtatgtttaagtcttaattaatcagcaactacactggaggctatggattctttatgtatcaacacgtgctaatgctaagatctctacaagaaagggttgttaccagtatgtgtaatcatgtaggtataacattattgttcattaggagaattaagagagtgcaggcgggtaactggatgcaggatttacatacattttgcaatcaggaatcggaaagaagagaagcgtaccatgtaatcaaacc

SEQ ID NO: 5623 - DNA, 385 bp, Zea mays
ctacaatacgtacgttgtacgtgcatctttcttctacaatcacaagcccaagaatcacagctccagctgagggttcaccgtgtaatggaaacagaacgtggaggtggaatctaatgacctgactgactgtctgtctgaccaaccaacaaaaaccccgcacagcaaaacaagcaagcaagcaaagagacggacgaacaccagcaccaccactacactcggcggcctaccgtgtgtcggcgccgagggacccgtccttctggagcttcaggctcaggttgctgaaccgctgccgcgagtactgccgggaggccttcctccagtcagtgccggccttcatcatcgccgcgaactcgtcgtagcctatcttcccgtcctgacagaagaa

SEQ ID NO: 5624 - DNA, 1430 bp, Zea mays
  misc_feature (59)..(62): n is a, c, g, or t
  misc_feature (506)..(506): n is a, c, g, or t
  misc_feature (518)..(519): n is a, c, g, or t
  misc_feature (523)..(523): n is a, c, g, or t
  misc_feature (526)..(529): n is a, c, g, or t
  misc_feature (543)..(543): n is a, c, g, or t
  misc_feature (546)..(546): n is a, c, g, or t
  misc_feature (621)..(624): n is a, c, g, or t
  misc_feature (627)..(634): n is a, c, g, or t
  misc_feature (646)..(646): n is a, c, g, or t
  misc_feature (660)..(663): n is a, c, g, or t
  misc_feature (666)..(666): n is a, c, g, or t
  misc_feature (671)..(671): n is a, c, g, or t
  misc_feature (673)..(673): n is a, c, g, or t
  misc_feature (679)..(681): n is a, c, g, or t
  misc_feature (683)..(692): n is a, c, g, or t
  misc_feature (706)..(706): n is a, c, g, or t
  misc_feature (708)..(710): n is a, c, g, or t
  misc_feature (726)..(727): n is a, c, g, or t
  misc_feature (729)..(729): n is a, c, g, or t
  misc_feature (732)..(739): n is a, c, g, or t
  misc_feature (744)..(752): n is a, c, g, or t
  misc_feature (755)..(756): n is a, c, g, or t
  misc_feature (759)..(759): n is a, c, g, or t
  misc_feature (763)..(767): n is a, c, g, or t
  misc_feature (769)..(770): n is a, c, g, or t
  misc_feature (773)..(775): n is a, c, g, or t
  misc_feature (777)..(777): n is a, c, g, or t
  misc_feature (787)..(790): n is a, c, g, or t
  misc_feature (796)..(796): n is a, c, g, or t
  misc_feature (798)..(800): n is a, c, g, or t
  misc_feature (806)..(807): n is a, c, g, or t
  misc_feature (812)..(814): n is a, c, g, or t
  misc_feature (817)..(827): n is a, c, g, or t
  misc_feature (829)..(829): n is a, c, g, or t
  misc_feature (831)..(834): n is a, c, g, or t
  misc_feature (844)..(844): n is a, c, g, or t
  misc_feature (847)..(857): n is a, c, g, or t
  misc_feature (859)..(874): n is a, c, g, or t
  misc_feature (877)..(878): n is a, c, g, or t
  misc_feature (886)..(886): n is a, c, g, or t
  misc_feature (888)..(889): n is a, c, g, or t
  misc_feature (892)..(900): n is a, c, g, or t
  misc_feature (903)..(908): n is a, c, g, or t
  misc_feature (912)..(919): n is a, c, g, or t
  misc_feature (922)..(924): n is a, c, g, or t
  misc_feature (936)..(948): n is a, c, g, or t
  misc_feature (951)..(956): n is a, c, g, or t
  misc_feature (961)..(967): n is a, c, g, or t
  misc_feature (971)..(974): n is a, c, g, or t
  misc_feature (978)..(994): n is a, c, g, or t
  misc_feature (997)..(1000): n is a, c, g, or t
  misc_feature (1002)..(1014): n is a, c, g, or t
  misc_feature (1019)..(1022): n is a, c, g, or t
  misc_feature (1024)..(1027): n is a, c, g, or t
  misc_feature (1030)..(1032): n is a, c, g, or t
  misc_feature (1035)..(1035): n is a, c, g, or t
  misc_feature (1038)..(1048): n is a, c, g, or t
  misc_feature (1050)..(1053): n is a, c, g, or t
  misc_feature (1058)..(1062): n is a, c, g, or t
  misc_feature (1071)..(1071): n is a, c, g, or t
  misc_feature (1073)..(1076): n is a, c, g, or t
  misc_feature (1079)..(1090): n is a, c, g, or t
  misc_feature (1092)..(1093): n is a, c, g, or t
  misc_feature (1098)..(1111): n is a, c, g, or t
  misc_feature (1115)..(1129): n is a, c, g, or t
  misc_feature (1131)..(1144): n is a, c, g, or t
  misc_feature (1146)..(1146): n is a, c, g, or t
  misc_feature (1148)..(1153): n is a, c, g, or t
  misc_feature (1156)..(1159): n is a, c, g, or t
  misc_feature (1161)..(1178): n is a, c, g, or t
  misc_feature (1180)..(1180): n is a, c, g, or t
  misc_feature (1183)..(1192): n is a, c, g, or t
  misc_feature (1195)..(1196): n is a, c, g, or t
  misc_feature (1200)..(1200): n is a, c, g, or t
  misc_feature (1208)..(1210): n is a, c, g, or t
  misc_feature (1214)..(1217): n is a, c, g, or t
  misc_feature (1219)..(1232): n is a, c, g, or t
  misc_feature (1234)..(1234): n is a, c, g, or t
  misc_feature (1238)..(1244): n is a, c, g, or t
  misc_feature (1246)..(1251): n is a, c, g, or t
  misc_feature (1254)..(1264): n is a, c, g, or t
  misc_feature (1270)..(1274): n is a, c, g, or t
  misc_feature (1277)..(1279): n is a, c, g, or t
  misc_feature (1282)..(1284): n is a, c, g, or t
  misc_feature (1287)..(1289): n is a, c, g, or t
  misc_feature (1294)..(1299): n is a, c, g, or t
  misc_feature (1301)..(1301): n is a, c, g, or t
  misc_feature (1303)..(1303): n is a, c, g, or t
  misc_feature (1306)..(1308): n is a, c, g, or t
  misc_feature (1310)..(1311): n is a, c, g, or t
  misc_feature (1314)..(1331): n is a, c, g, or t
  misc_feature (1333)..(1333): n is a, c, g, or t
  misc_feature (1335)..(1338): n is a, c, g, or t
  misc_feature (1340)..(1342): n is a, c, g, or t
  misc_feature (1344)..(1352): n is a, c, g, or t
  misc_feature (1355)..(1359): n is a, c, g, or t
  misc_feature (1370)..(1373): n is a, c, g, or t
  misc_feature (1375)..(1391): n is a, c, g, or t
  misc_feature (1398)..(1411): n is a, c, g, or t
  misc_feature (1417)..(1425): n is a, c, g, or t
tatcgcaggcgcactgccgtaagcacggagcacaatgctcatggtatcaacgctgtacnnnnatcatccgctgtaccttagcatctgaacatatggattggattattcttgttcctttctggagttgttttagctgtatcagcataatttcatcagcgacactgaccagccattgtaattcatcagtgataccaaaaggaacatgactaacccttaccattttaactatggtgtcattatgttgcttgaaatgtctctctagaaagttgaaggctgcaaaaggcaaatagtaaattgaatgttttattttgtcaaaggtcaagaccctaaatacaccaaaattggtgttaccaactgaatgttgaaaggtaaaaggcttgtatacataatgaacttataaaacctccattcttcacctttcacaaatgtggcgataaatttccccccatgtttaactgccattgcatgcatacaaacctataattaaagagtaaagtaagtagtgnctccttccccannagcncannnnttaatcaaccgcanaangtactgtttgcgggatttgagtttgagacactatggtgcaactaaccttttcctgggacttgcgcattcctattnnnnagnnnnnnnnatccactgattnctgaatctcttgannnntantatcnantgatcnnntnnnnnnnnnngcttgtttgatctncnnnaagatggaaattactnnancannnnnnnncgctnnnnnnnnnatnncangacnnnnntnnaannngnaaaaaaggannnnatttancnnnaatttnncgaannnaannnnnnnnnnntntnnnnaaccccccgnggnnnnnnnnnnncnnnnnnnnnnnnnnnnaanntaaaaaancnnaannnnnnnnnaannnnnnccannnnnnnnctnnncccttccttttnnnnnnnnnnnnncannnnnnggaannnnnnngagnnnnacannnnnnnnnnnnnnnnnttnnnntnnnnnnnnnnnnnttccnnnntnnnntcnnnaanatnnnnnnnnnnnannnnatctnnnnntaattccgncnnnntannnnnnnnnnnncnncatcnnnnnnnnnnnnnntaannnnnnnnnnnnnnnannnnnnnnnnnnnntntnnnnnnccnnnnannnnnnnnnnnnnnnnnntnccnnnnnnnnnntcnncttnccaccatnnncttnnnncnnnnnnnnnnnnnncnaccnnnnnnngnnnnnnccnnnnnnnnnnncttctnnnnncannnccnnngannntttannnnnncnancannntnnctnnnnnnnnnnnnnnnnnntnannnnannncnnnnnnnnnatnnnnnctttttcaccnnnnannnnnnnnnnnnnnnnntactctnnnnnnnnnnnnnnttacannnnnnnnntacct

SEQ ID NO: 5625 - DNA, 563 bp, Zea mays
ttctgttgccgcttagaatcctagtacgtacctggtctcaggcgtccctgcggcacctgcaccgacgcctcccgacgagccagcagcggcagcggaggaggaagaagccgacgcagctgcagatgccccttcaggtgctttcgtctcagatgcttcacatgcatgccccctagatgataaaacttcaaagattacgtgcagtagtttgcatgcttacaaacagtatggagaccggcctagctatacaagaatgtatatatgcactaacctggcaacggtgttctatttgatgcagcaaatggagcctcaagctccacaaactcaaagaatgcagcgagcttactgcttctcatctgcgcattgctgtatgccttctaataagtggtgatacaacttcgctggccatgtcaccgtgcaggaattaggtctttccctgagtcctgactcctgactatgtacctacccatgattctcggcaaattatttgtatggtatggtatgggtttctgatgtgccacatcaaacaacattgcttttcgccaaatgagaaagatcagttctcg

SEQ ID NO: 5626 - DNA, 390 bp, Zea mays
  misc_feature (62)..(62): n is a, c, g, or t
cattttcatgggatccatttcctttgagccatggaaacgattgtggaagacttgggctcccncaaaatgtaagttctttttgtggttggcaataaggaactagtgttggactgctgatagacttagaaggagggttgcagcacccactggtctatactttgtgaccaagaacaagaaacaatccaacatcttctatgcacttgcagttttgccaggcagttttggcatgatatccttttgccattgagataaggatatcttttgctgagtggtggcgaaaggtgcataaaaaggtgcacaagaccaaaagaaaaggcttcaatagcctcataattttgggggcgtggtgcttatggcttcttcgaaacaaggctatttttgatggagtaa

SEQ ID NO: 5627 - DNA, 380 bp, Zea mays
aacttccccaagctgcccgcctttatgtggagaggatagaagaacttgttggtgttcccgtgcactacattggtgttggacctggcagagatgctctcatatacaagtaaaagcaactttatttggtccttggttgggcggaaaccaggctgggactcgggagcatttgcattttcttggcgtggtaacttttgatacggtgaagtcactgactcgtggagtgatgttgctcaataatcattaatcagaaccttgtcctaatacagccgctgagacatcagctaaggcgaataagggaaggatgagtcatttgcaccatgtttgaccaccaattgttaggtggtccatatattttgtacttattgtgagactttgtgcta

SEQ ID NO: 5628 - DNA, 350 bp, Zea mays
agccgacgtacctcgccacgcccatgtcgagcagggcgtcctccttcggcggcgaccgtagcagcagcaagggcgtcgacgacgacgaggaggagagcaacaaggaggtgcgggcagacgaagccgccgtggccagcgtcatggacgccggcggacagaatggtggcgagcacagtgagcgccggagagaaggaggagatcaggagcgccgcattcctgaggtgtgatttttgtctcggtttttgctttgctcggagaagctgagctcgcttttgacgctggaaaaaccatctccggccaggagaagagaaccccgacccgagcacgattttggtggggttgtaattttt

SEQ ID NO: 5629 - DNA, 398 bp, Zea mays
gggcgtgccctgccactccttcatccaagtgtagagagaaacccccggggaatatttcttgccattttttctcccgtctcgtcgtcgtcgttctccagtttaatttgcctgcgtgagcgaagggtttcagtccagtctaaccgcgtttgttcagagcctgctgagttccatctcagggcttgaattcggccaatcgaatcaagacagtcgcaaacgataggattataaagatgatggatacatggcgtaaattactgtgaacgggtacgtaatgtcatcccagtgccagtgtgcgtgagccagtagttctttggttccttgctctgtatatattctctctttttttttcttcctgagatcagcaaaacagttcggaattcaatagatgctgctgtaaa

SEQ ID NO: 5630 - DNA, 916 bp, Zea mays
atgttctatgttgtgagatatatgctcaaactttctgttttgttcttttcatgagctctgcagctgaggctactgtaataattgcagggaagcctgattattagtgattcactgaaccataattctatagtcaacggagctaggggttcaggggccactgttcgggtttttcaacataacagtaagtgactactgactaactatgcaagtgctgaggtcagtggagcactgtaaagtctaatgcctttccttcatttctcctagatcctgctcacttggaagaggtattgagagagcagattgcaggaggccagcctcgcacacacaggccatggaagaagatcattgtaattgtcgagggaatttatagcatggagggggagctatgcaaactccctgaggttatttctgtctgcaagaaatacaaggtttgagtttgtttgttttttggtgatgacttgtgtttcgtattaggatcactgtgcatcttaataacggcaataaatattttcctgcatatgggatgtgggctggcatatgtatcattgcagctttcactagtgacttaaacagttaaactactagttttgtattgggtatttgggtagactaaggtcctgtttggaagcacccagtttttaaaaactggtttatagaaattgaggtggttccaaacataccagtttatgactcagtttatagaaattagattctcagtttcttaaaaaccaagaagctggtctctcctagctaaaagatagaaactggtttcttaaaaactgggttgcttccaaacagggcctaatatacctcacatatgaacaggcctacacatatctagacgaagcacacagtattggagctgttgggaaaacagggagaggtgtttgtgagctgctcggagtggatccagctg

SEQ ID NO: 5631 - DNA, 630 bp, Zea mays
tggcgaagccgaggagaggggcgaggacgtaggccacgatcacgtagtaccacttgacctgccggaacatgtgcgggatgatgaccgctgagacgacggtcagcgcggcgtacccggcgtaagctgcccaggcggggaaagacccgtcgctgaagatctcgtcacgctgtaggtcgtcaagcgcggccatttcgtctccaccgtttgccactgttcgttcagtcaaccggcagcaggtgttatatattctctcgatcgatcgaggagtgatgggggaggctcgtgtgctagaaagaaccgagtctgtggtgttttcacctctgttggtagcacgtttgcggctcagccgttgatgcaggctcttaacagtgacaccgaagactttaaagaagtggtatgtaccgtctcccatgatcagagctatgcagaggaatgcctggaaggccagacagaaagacatgtttactgacatatgatctccaatactttctttttttaaagaagaagaagaagaagaagaagaagaagaagaagaagaagaagaagaagaagaagaagaagaagaagaagaagaagaagaagaagaagaagaagaagaagaagaagaagaagaagaagaagaagaagaag

SEQ ID NO: 5632 - DNA, 484 bp, Zea mays
ctcataccgagttggccaatctgaagtgttcttgtagtgatgcctggcttctgatgtgcattgcatgctgtacatgcaggactagtgaagatactgaagaagtatgacaagagaacaggcggtgtgcttagcctgcctttcactcagcgtgtccgtcaccagccatttttcacaaccgaacctttaacaaggcttgtccgagaatgcgaggctaacctcgaactacttttcccgatcgaagcagaggttcttgagcctagttcatcctcgaatctggaaccgcatgatgtggctaggtgtgacccgacatcgtcgcgcgatgtggaaaccgtcgatgtttaccgaagcacactcgcagctatgaaggcgatacagggccttcggagagccagctctacttacaaccccctgtctctgtctaggttcttccacggcgaggatggcgaaccctgctcgggtgccatcacttctgagagctcactgt

SEQ ID NO: 5633 - DNA, 502 bp, Zea mays
cctcatttcctccacgtacgcgtgcatactctgcgagtccaggagatattttcccccttcttcacgatactctcgacgagagtgtctccatggccggaaaaggagacgggccggcgatcggcatcgacctcggtacgacctactcgtgcgtcggggtgtggcagcatgaccgagtcgagatcatcgccaacgaccagggcaaccgtacaacgccgtcttatgtcgcgttcaccgattcggagaggctcgtcggcgacgccgccaagaaccaggtcgccatgaaccccatcaacaccgtcttcggtaagccgatcatcaccaatcttttgttacgtgcgctgtttatctgtttgttcgatccattaatacacggggtttgggtgtgggtgtgggtgtgggactaatacgctgtgtggtttgttgatccgtttgcgcgcatttgcagacgcgaagcggctcatcggccggcgcttctctgacacgtcggtgcagagtgacgcca

SEQ ID NO: 5634 - DNA, 863 bp, Zea mays
tactcctgtgcgaaatcgaggatactgactcagtgtgcctgtggttgggtgcaaatgtgatgctggagtactcttgcgatgaggttattaaacaatgatcagccgtaattgtcagtgctactttagtttcagttcagctctcctcatttcctgagcttttgcaggccaatgccctcttgaagaaaaacttggaaaatgctaaggccagcttagaagtccttgttgctgatcttcagttcttgcgagaccagcaaaccatcactcaggtaaaaattttatgactagggtcccgtttggttagagggattagtccctagtttttagtcctgtttagtccctattttgccaaacggaaggactaaaatagggactaattcgctttagtctctagtccctcacatgggtgctaaaagggactaaatgggcaaatggcaacatttactcaaattgccattgcttaaaaaattggtgtcatacacaggaaacaagaaaagggatatttcggtccttatgtgttatatttaatgtatttagaatctatttagtccctacaactaaacaaggtattactgaactttagtccctggactaaactttagttctatgactaatggtagtagtttgcatgatttggcaatgattataccatggtctcatacctatagtgtggaatgatatcttatcaggttacaattgctcgggtattcaactgggatgtacaccaccggagaagcaaacaggctgtaaaggaaccttaatcagttagatcacgaggtcaaccaatgtgattgggacaaattttttcgtaccttttggtacctctggcagattagtccatcatagcgagctctttgtttgttgat

SEQ ID NO: 5635 - DNA, 901 bp, Zea mays
  misc_feature (884)..(887): n is a, c, g, or t
  misc_feature (895)..(895): n is a, c, g, or t
aataggacattctgcgggttcgccttacatcgatccgagctattttaaatcgctcagagaagtaaattggatgcctggaattatgtttattattctcctctatgaaaaatatctactgccttaagcaggaacctggttctgatggtgccgagcggccataaccagctagtggtgcagcagcaacccctctttgattcagcaagcacctgaagcgtgccaatcttgcagtgaccgatcttgtgtccttcgccagcttctcaattggtgtccatagccgctcttcaaatcagtaagtgatgtggtgagtcaaggcaacttgatacagacaaaactttgtttttttgcgagagaactcaaatcaaaactatacattgttaatgaaatgtaagttatgagcgtttataaacctgatagacttaacttattatgcctttcatactgtgcaggcatgtctagtctattcgtagtctgcatatacattcatgttcgcttaaaataagaaagaacagatgtttcagtttgtcagttacgatgtgaagcgtgtctcccaattctctcaatacaacgaagcacatcagagcatttggttatgaaagatccccattctgacatgctggtagcaattactgctcaaatttttcattgctaattcgcttatatcaagcgcttctgtcctgggtatgcgaagagagcatcgactgccttggctacgtcgtgactgctagtatacttaatttttctacagtactctataagaatctatctgctaaagtattaaggaggtaaaaaataggtcaaaacatatcgagctgatcatacctgcagctgctgcagcacgtggccaaattgtctgctgaatgtctgatgcatcaatgtgttcgccnnnncatgcatncctcac

SEQ ID NO: 5636 - DNA, 832 bp, Zea mays
tttctctcctcacctttcctctcgcatttctttttgtgtgcattgttgccttataacatatatcattctaggtcgtttgctttgaacccttaagtataagattatagtgtcgcaactcacaagtgcacaacttgttttctttctggtcagatcctttaacactacagctttgattcttacacggctaaacattttttttaaaagctcaatcataatttgcagaagagcaatatgattcatgagtatcatgacccatcctatattctctggatagtgtaatacttgcaacagctgtatgttctttgaggtggtctcaggtgttattatgttcctatcatccacaatgtaaaatgtaattgttgttttacttgttgtcaggttaccataccctttatgaatggtaccgaaaagtggaaagcgaacattttcctgatcccacaggacttcgcgctcgtctcgagcattggacctttggactttaccctgcatgtattaagtacctcatgtctgcattcgacatcccagaggttcttccattttttaagctgtaatgagatcatttctgattgttgttgttgtttgccgcttacgccgtatatattctctctttcaggttatggcagtaactagaagtacaatctgcaaaaaaggaatagagtcccttcccaggggaggtgccatcatctattatgtctgtgttttcctgtacttctgggtcttgtcaacacctgtcgtatcgctggtgtttgggagctacttatatttatgcataaactggttccatatccatttcgatgaggccttctcctcgctgcgcatagcaaactataag

SEQ ID NO: 5637 - DNA, 1442 bp, Zea mays
  misc_feature (1378)..(1380): n is a, c, g, or t
gataaggcaaaagaactatcattaaatctcaagagtatcactcaactgtataacgattatgctgttccatttgatctctgggaggtatgttttttcttggtttcgtagaacttactcacgtggccttgcttttgtcaatttaatatgctgtgctgcgtctcaatggttcttatattctcaaactatgcagtatgcactaagcacttccataagactcctactactattgcataataacaaagcttatgaatatggatcattttaaagatgttgaaataagagatataagagtcagatgaaacttgaaacaacaggaataataaaaaactcgacctgcggggtaagacaacccacgagtattgtatatttgtatttaagaagacctcacacaggtcgagaaaccccccgaacccctgccccacccatacacagcggcattgaagcccatgtgagaacgattgcgaccggggccgagccttatacgtgtgctttggcgtgggacagacgaggtgattttttaaccacagtctgaaattcgctcccacggtgagtcgaacctaggacctgaggtgtgctcagaccacctatctaactcagttagatgccctttcgctaaacaacaggaataatcatttgtggtgatagcgctagccaactaagaggcaagcaggatactgagtttgacagaaaaatcaacagtgagtttctgtgagttgggattgtggtactctgggcactggtagaaattaacttctctctcctttgataaacttaattttgaaaggatttccttagctgtgggacttagtatgtattcttgtccttaaatctttagtattgggtgcatcaaactctgtttacttgtaactgtacacagttaggacaaaagatttctaaattaactctacacagttagaactcataatggggtcaggatacgaattctcaacataatcatttcctgaatctaagttttagacagtattcatctgtttgttgcctgacttgctgttggtactaggagttccctgtatctaccaaatcctgcatctatattgggttattagcaaatggtttctcttaaaaagacttggaacatttttttattaggtttgcttggaaatgctgagctttgctaattactctggagacgctgatagcaaaattgttcgagaagtttgggctagactccttgatcaggcacttactaaagggggtgttgcagaagcttgttctgttgtgaaaagagtaggctcgaaacttgatcctgcagatggagcttgtttacctttagatatcatatgccttcaccttgagaaggctgcagtggtaatgtgtattttctgtactttccgtacatgcatacttgagactacannngagagcattccactgtggtactcattatcctgctcttatctacaggatagataagtcagaga

SEQ ID NO: 5638 - DNA, 389 bp, Zea mays
  misc_feature (380)..(380): n is a, c, g, or t
ccggtgcccgctcaccaggaccacgcccaccgacgtcgagcccgtgccgcagagctgccgcgccccgggggagctcaaggtcatcttctgccaggcgaccatcgtcacatgcggcggcgaagcagagcgcaccgtcctcgccgacagctagacagatcgagccgtccagctccattcgcctccaggctccgctgaatccttacagtaattgtcatgctttcttttgctccatgtgtttgttagctttggcttcgacgcgcgtgtactccggtggttttattttagaaatcagcagtgaagcaaaataattgtcttcggatatgttaaactggctgagccattcaaaatccacgaagcgcgagtgaggtgcatctgaatgnggttgtggt

SEQ ID NO: 5639 - DNA, 380 bp, Zea mays
acttgagagcgcagatgcaaaatctgtagtagttgatgaagggaattactcaaatggatccagaaaaaatgaggagaagcttgatcttggttctgtttctgggtcatcacattcagaaggagagtcttcaggagaaaagtcccaactgacaacaagttcaggagctgaaggtggtgactttgaatctggtgatagtgcagagcttgaggtaggaatggtggatcatcccatttctgttgctgctgcttcagaagaagtgacagcagatgaggataacactgcttcagctacttcaaaccaaaataatccagaggtaccacaagttgaagaagtgcggaaagcagacaaggataacactgcttcagctacttcaaaccaaa

SEQ ID NO: 5640 - DNA, 389 bp, Zea mays
ctctggtgggggcgggtgattggatacgcgtgtgcgtgggggagtttagcttcgtgtccccccgcacatggggccatggggggtgctgagggggcgtggtggttagcgactactagtagattagtgtcggggttaggccaccaggggctaggctactggagggagtgtgtataattgtgggaagaagtcacgtacacgcacgcacgcgcgcccggatctaaccaagattgcgctgcgccccccacaaaggctcaggcctcactgacgagcgcgcgcgcggggcaccaaacaaatcatgcagccacacctgcacctgtctactgctgctaagctctagtttaatcatggcagtgcttgcgctaatgctggaactagcggcactaatcaaa

SEQ ID NO: 5641 - DNA, 453 bp, Zea mays
gatgggtatcatcttcagcaccattgttgttgttacatgccttctcaatgcttgattcagttgtcaacatgagtacgatatcccctttgcaaaccaaactgagattagttcaacatgtttccttaattttgcgtctctgcaatgattctgcaacacacttagtaagcaccttagtttcccccctccttgttacttaaacttttgaaagttgttttctaatatatgatacatatggaataataggatgagttgggaagaggagatgctccatctttcatagctttacacatgatcgagaatggtggtaatgagaatgattctcgtaaggccatgcaagagcatatcttgaagtcatggaaagtaattaatgaggaggcatttgatagttgccagtattctatgccctttaataaagcttgtattgacttggctcgcatttcacattgtgtttat

SEQ ID NO: 5642 - DNA, 461 bp, Zea mays
tttctttacaacagcaatagacctgaaactgctatgtacagtattgcttctcgctaattaagtgaactgttacattaggactaacacaacattacttctccctaacttcctgacaacaacaacaaccgagacaaccaaagagactgcagctcccttcgtgagctagctgtggaacctttctttacagcagcaacagatctgaaactgctatgtacatcaagtgaactgtaatattaggactacacatcattacttctccctagcttcctgaaagcccaaaaaaaacaaacaaactgtaagacaatgtcagcgcaaacagatcttagacaaatcgtgctcctgttatatcgacatgacatctcccatttcagtggcggtttaccttgtgatacacgctgaaggagcgctacaaaattttctgccgctggtctaggtgatcaggcggcacggaattagtgaag

SEQ ID NO: 5643 - DNA, 480 bp, Zea mays
tgaaggaataactatactaactttttttttggttttttgagtgttcaaatgcttcaacgaatctttttctggcgctgacaatctatattctcttgtatgtgcagtgaccttgatgagaacctgcagagggaattccacaggtacctggatctgcgtggcatttcacccaggaccacaaatttcttgcacctgtacatgatcaacaaggacagccgtgagtacctgctctggctgagaaagctgaaggatttcttcaagcagtaggtgtgaagacctgaagatcagctttatctctcttttgttcctgctagggccttctcggttattccaattccatgtggattgaagtgtattaaaataaattttgacttgttatggatttaaattaacttaataccacccaatccacatggattattggtgaaacaaacaagccctagtcgaaattcttgttaagttggtagtttgtcagacccgaaa

SEQ ID NO: 5644 - DNA, 391 bp, Zea mays
gcagaagattccgatgccagttgctactggctacataactcaagaaaaagaaaacatgtttgcttctaaatcatcgattaattttcccctttattgtaccaggatataatccctgtcgaaggcctgaagctagacaacattgagacgggaatatacatgctgcattgtttacctctcagactggttggagccgagggtgcaccgaccagatgcatcctcatcaagtgatcacccccctgctcttgctggaggtgacattgtatcatgccagctgagctgatgcttcatcgtggccaacgcattgattcgcagtcttcgtcttcgtctatatgaaacatagtgttgtatgcccatgtagatatgcttgtacggacaatagagacacagcaat

SEQ ID NO: 5645 - DNA, 389 bp, Zea mays
  misc_feature (381)..(382): n is a, c, g, or t
acatgtgactggacttgattctcctgttaccagagtttgggaaagcaaaagtaaaggaaatgctaccttatcacatatacatcacccactcgaatctcctggtttccatagagcaaagaagaacagaagtcatgtgggaaaactgaagatgtcaagaacttcttcaggaagaaaaaggtcaaggtcaaatgctcagaagcctcctatctggcaagaagtggagagatcctctttctctgttggtgatagtatggacatactaaatacatctgcaaatgatctaaagacgcatgagctaggcgaggatcctgaggtggaaagtatggctaggatgtttagtagttcaaatgcttcatctttattgttgccatcaagtgactnntgcatat

SEQ ID NO: 5646 - DNA, 1219 bp, Zea mays
tgactactgtggtacatgcttaattttttttgccctatgatatctttagtttaaaacttcagaattctttaataaggttgccagtaatcagtttctatttatttatgaatgaaaaagtatgttctatatgctctaactaatgactggctgtactatttggttgcatttagggtttagttccgcggatgtgtttgaatagttcattattaacactatactaaatgctagctgctctgcgtattcaggcactgcgccaccttagacaaattgctcaagaaacaagtggagaagtagtgtatgccttgggaaggcaacctgcagttctacggacctttagtcaaagactaagcaggtaatttttttattgaactttaaccccgactttcatgtacatcttgctgtctagtttaaaacataaaagtctcttgttcttccattagggggtttaatgatgccattagtggtttcaacgatgatggttggtctgtaatggggggagatggcattgaagacgttgttgttgcttgcaactcaaccaagaaaattaggaataatagcaatgctgggattacatttggagcgcctggaggcattatttgtgcgaaggcatccatgttactgcaggtaagggtgatcattattcgtgtgaaggcattatttatacagtctttgcatattttatatttagaaataaagagggaaaagcaggaactattgcatgttgcattgtgcacaaataaacaaatgaattgcagagttttgttatattaccttgtacctcttaataaaaaacgttatatcatccttgtttgatttgcactttattgaatacatttcgggttgtgcacgttatttatagtaccaactatgtaccgagagctacagtaacttctgaattttgagactgatcttgtaccacaatcagtggtaagcagaaggaggcgcaacagatgactttttgattgtacataaacattgtacactagatatctaggaattctgcttaaatgcagtggtgggtgcacatttgacactagaaatttgagtttcacccctgtaaggtcattggaggagctccagcccagtttgaaaataaaaaatttgctactgatataaatgcttttaacattatttctgaacctacctttcgtcctttcccatatggtatgcctttttaaacatgtttctttattggtattctagagcgtcccaccggcag

SEQ ID NO: 5647 - DNA, 364 bp, Zea mays
tcatccgacaagaacagcttcttgttcatctacactatctgcttgctcctcgcctcatatcttgtcggcgtcatgctagtccaagatttcatgcaactgagtgacaatgtggttaattttctcactgtcattctactcatacttcttgttttaccaatcgtgatccctgtgaccttgacactgtcatccaaaacacaacatccaattgaagaggctctcctttctgatccatcaaaaggagagacaagcacttcacaagagaaagaggatcaaccagaggtcattttaagtgaggtggaagaggagaagcctaaggacattgattcattacctccatctgaaaggagaaagaggattgaagagt

SEQ ID NO: 5648 - DNA, 408 bp, Zea mays
  misc_feature (393)..(393): n is a, c, g, or t
agctctcgagctcttcatgttccccaactgcgagtacaactcgctgttcgtcctgcacaggcacacgagggagcactcgtctaaggtcgagtgggccaaaacggtcgacgagatcgtggagaaggggctgagggagagtagaggagggttggggctgtggactccgtaccctgcggacctcagctccgtggaactccctgctgtaagaagaacttcgccggcaggataaggctaggctgtcaaagaccacaaagctcccagcctagcctgccgagcctgtggtctttgattcgttcatggttgtacagagtagaactccactgtttgtttgttttttttggcgtagattatgtaggctgacgcttggagtttgttgctttccagttctaaacngttgcttccagttct

SEQ ID NO: 5649 - DNA, 477 bp, Zea mays
gcttgttgactacttataatgaatcagtggttagcagcttctgctggtttatccaaggttttcagttaggtgcagaaactacacttcttttttctgggctatataattatttatacatgagaatgagatgcaagaactgagttgatattgagagttctggtctcaaattgcagttacgttctttgagttctgtgatcttttgtgcagtgcgacctgacgttgatattgcgtctctttttccttaacctgacaacgtagtacatgaccatcgtatttgtgcttattatgctggaaggcgcaatcactatggatgtatttctgaatagcaactgggaagaggtaaggagctcacagctcagctgtgaactctgatacttatgattttttttccttatctgctactttatgtcatgacggagtatttggcaattttcgaaaacttcaggatttccccgctgacccatcaggcaagtttga

SEQ ID NO: 5650 - DNA, 485 bp, Zea mays
acgcgtatacccaggcggcggttgaggaagaggaggagaagaagaagaagatggcttcctccgcatacgcctcatggtccaagcggtggatccgtcccgaggtacgtacgccgttgctgtttcccatctgatcgttcattcggtttctatcgatcggagaattgggtcatcggggatggatggatggatctgacgggatttgccgatcccggtgtcgcgcgcgtccatggatcaggtgtacccgctgttcgtgccgatggccgtggccttgggcatctgctcgtaccagcttgtgcgcaacatcacgggcaaccccgaggtgcgggtgaccaaggagaagagggcggccggcgtcctggacaaccacgacgagggcgagaggtacgctatgcacggcctcaggaagttcgtccgcgggaagaagcccgagatcatggcctccatcaactccttcttcgccgaccctcccaaggacgattaagcta

SEQ ID NO: 5651 - DNA, 406 bp, Zea mays
ctctgttcttggcttgtcatcttgtcaatgcgtcatcttgcacatgtgagctagtaagtacaaacaacaaacgaaaacaaaacattcgattgattttttgatgcgccaaagacaaattttccgccaaacaaaaaggcaaacgacacaaaagagctagagaacatctaaaaccaaaccccgataacaaatgatcatggtggatcaagatccaaaacccaataagagaacaatcttgaaggacaacgaacagacagctaccagaacggaaaaacataaggtagagatgcaaacaaaaatgaaaggggaaaccaactcaaagaagaaaaaaattgatgaagatgcagatcaagatgacaatgcacctcaaactcaggtagtacttaccctaattcatcattgtctgctc

SEQ ID NO: 5652 - DNA, 307 bp, Zea mays
gctgctgatatatggtatggtatatcggatggtaaaatggaacgtcgtccagcagttgatgccattgccacgacggtggttgcttgcacgctggtcgagcagcacaaggcgcgcgcggtggtggcagggagatgcgcgcactcggctgcgaatacgtggagatgctggagcatggaggggacagagactctttgacaatgtacgtagctactatgggatgatggaatggaaggatgcacgcatacctgatcgaccgaccgaggacctgtgctggagcctctgaacacacagcagcagcagctgctgc

SEQ ID NO: 5653 - DNA, 377 bp, Zea mays
tgatggtgagagtaaggacggtcaagaagagaagcctgatggcgatgccacccaggaggagcaacctaaaatagaggagaatgtggaagaaaatggagagaaggatcagagctcaaactccaacgaggtatttcctgatggggcccaatcagagcttctgaaggagtcaaatacccagaacggttcattccccacacaggctgcagagtcaaagaatgaaaaggaagtccaagcgttaccgaagtcttcaggtgttgcaaccagctatacctggaaattatgtaatagtagtgcctcaacagattacataccttgccttgacaacgagaaggctatcaagaagcttcgaactaccaaacattatgagcatcgtgaga

SEQ ID NO: 5654 - DNA, 515 bp, Zea mays
  misc_feature (505)..(505): n is a, c, g, or t
  misc_feature (507)..(511): n is a, c, g, or t
gactttaaactgcacctttctactttcaagaacctgtccattttgtattgtttggattcatttgtttgcaccttacttgtttatgcatatgtttcattatttcagaagtcattgatatccctgcaatttctttcttgcagatttactccaaatcaacagatgtatttaatgaacgatggcagcatgcctggattattcctgccttctggcatgtcttgtctttcttacttctttgtgtcatttgctacctgtgggcaccttcacaaaactcaatgaggcacgctcctaatctttttgtaactttcagctgggcaatgttttggttatatataccatctttttggtatttctggttaactatagaaaaaagcttatagcttttggctttccttttcagattttcttatgatgcaagtgaattctttgatcgaaaggataatatctcattaattaggccagcacccagtgcatccaagaatggatggaatttatcttctacaccagngnnnnnaaag

SEQ ID NO: 5655 - DNA, 395 bp, Zea mays
ccgctgccactgcaagcccaggaccgaacgccgcacaggcagatggcaacggcgacgcacaaccccgccagctttagcatggatctgccacaccacctccacctctgcatctgcctctgcctcccccgggagcactccatgtccatggtctgcagggaaactcctctttttcaagccgccgcagcaaactgtgtagaggcggacgtcggcaggcaaccaaatctaggaaaccgagaggcacggggggagggcgtgcgctcgcgctgcgcaccttcactgctgcattgtaatatagagcagagccccccgcctctagctgcgtccctctcccgctcaaacctcagcgcggctacctcaggcaacctgatcgtcaagtttaatggatcagcgagaag

SEQ ID NO: 5656 - DNA, 618 bp, Zea mays
aaaagatgaatcccgtagactacaataaccgacatcatcaggatatacactttacatgtaaagacgaaattgctgctgtcgaggagagagccttaattacagaaatgaacttcagagacgcttcttcagagaaccacttaagtttccatgtatgtactgtgccgatttcctcagactgcttgttttgaggattttggatgctattgtgaaactctcctggcctaccattatccaaaatcaatgtcaaacatttgttgttgcgctgatccatgacctgaatgtacacattgcagaacaaaatcaactttctgaatgaccactcagagtttgtgggggcaataaacaaaacaagaagcacaagcaccctgtgtccatgccatgaatatgataaggactaccatcataactacaatatttcaagactcattaaggtagcaagtcaccacccatatatagccgcaccgtaaccacccagacagtccttggaaagccttctcatacagattaagaaaccccctaaacccttgcaccacccatacatagcggtatcgtaggtcatgtgagcatgttaggggccgggacttagacctatgctttggtgtgggacaaacgaggctt

SEQ ID NO: 5657 - DNA, 854 bp, Zea mays
aagggcagggatcaacaggaacatctgattttgctgtagcaaaagatggaaaccttataataagcatgagcaagcagaacacaattcttctatttgatagggagacaaaacaggagagaataattgaagagggtagtacaattacttcattttgtctatcagaagacggtgatttcctgcttgtaaatcttgtaagcgaagagattcatttgtggaacataagaaatgatcctgttcgtgtcaaccggtacaatggtcataagcgcacccggtttgtgataaggtcttgttttggcggatttgagcaggcgttcattgctagtgggagtgaagattcacaggtatgatgattgatgattgccttgtgacccacctaatggctatagtatgcacttacattttgttgtcttttatgtgctgtttttattaatatgtctgttactcccagacaaatgctgttctagacaattatttttgttgtccaacgagtcaaatctaatagagtatgcagctaccctgtgttccaaattatgtcattactagacatagcgtatatctaggtgcatagcaaaaggtatgtacctagaaaagccaaaacaccttatagtttagaaacatgtttgtcatttgaaccatcctcattgcacaagtgcttatgtctgcatgcagcatacttgacacgcacatgctagtttcaaccacctatcttctatagtttcatacattcggcatgcagcatacttgtcacttcctatcagtctttgaccaaaccatgctgctggtttttttcagtatgttataaatatgttgaaattgtctgtttctttcaactgaataatatgcaacacttgtca

SEQ ID NO: 5658 - DNA, 393 bp, Zea mays
  misc_feature (382)..(385): n is a, c, g, or t
acgcgaatacatggctacgttaagtacagcgcgttgcgcaaatacaatacactagagaattaataacgtacaacccagactaaaacgcacgtgactaacagagtctatttattataacaaagaagaaataaataaagccgagaagccggaacatgaccgcgtgcccaaacgagctgtgcagtgtgcaaccggatcaaccagccgtacggttggggcttgctgccggtcatgccctagcagaccttcttgcagtagcacttgcgcatgacgccgtccatcttgcactcgccgcctgtgaacttctccgtcttgcatacgttgtcgcagttggtgttgctgaggcacacgcctttgaaggcatggctctgcgacaagcagagcnnnncttccaca

SEQ ID NO: 5659 - DNA, 374 bp, Zea mays
acacggtttgttggcaattctcggacaagaccccatttgtaagccagatcgactcccaccaactaaggcacacaggtactagcaaataacaatataacatgaaagtatgccatgtttgccggcacaagcgccagcatgcaacgcacgctttgaaagttccacaactcaaactcaacaaaaggactcgttccattatttagacatcagacacctatcatgttaacagaaaacactaccgaatacatatggcctagaatccacacggcctcgcatggtggtggtggacacaaattagctcctcttgttggcgtagctgtcaggctcatcgtccttgaagagatcatccatgatttcatcattcttgttaccgtcac

SEQ ID NO: 5660 - DNA, 620 bp, Zea mays
tctctcaactagttatttctatatatatatatcctgcattgcgttgtgtcatgtcatgtgcggccgcgttcctctgtgcctgacgtagtgacgtacgtgtttccaggccgatccttcacaggttcgcgaacgaggacgtctcgctgggcgcgtggctgatcgtgctcgaggtcgagcacgtcgacgaccgaagcatgtgctgcgcgacgcctccaggtgggccatgaaactgacagcatcacctccggcggctccgttccggaataattcacaccaacggcgagcctgctgcatggcatctctgactgtgtgtgcgtgtgtgtcgtctgcagactgcgagtggaagaagcgagccggcaacgtgtgcgtagcgtccttcgacgggtcgtgcagcggcgtctgcaagtcggcggacaggatgatgcggcacatccacagggcgtgcggcgaaggcgacggggccgtctggaacgccgccacgtgagattgcccatctcacatcgggaaccccaaccgttgctgtatgtggaggtggagcttcactcggcatccgattttctgaaaacgccaaggcgagagggaagcgaggtcgttgatccactgtttggcatattgagcat

SEQ ID NO: 5661 - DNA, 380 bp, Zea mays
tcttgttttgttgatgaactgtggagcagctgccttgcaattcgccaggacggagggcatcatcccggcgccggagccgacgcacgcaatcgccgcggcgatcagggaggcgctggagtgcaagcggaccggggaggagaaggtcatcctgatggccatgtgcgggcacggacatttcgacctcgccgcgtacgagaagtacctgaggggagacatggtcgatctctcgcacccggcggagaagctggaggcctccctcgctgccgtgcccaaagtctgacggcgttggagccaacagcacatgcgactggaatgggacgaataatccattgatatcaggttcatgaatcttgtggtgatccatcgcccatcggcagtgg

SEQ ID NO: 5662 - DNA, 475 bp, Zea mays
ttagttttaattgcagttagttaccgggagatcagatatttttggcctgatgtgaacggtttcatcctctactttctcaacccaaccctccagatttttcaaatcgcctttaataacaatgacggcatcacccttcataaagtgtccttttttcctgtttgcaaacagagtggacaagctagccatgtcgccattcatgtcatcaccaggcttcttaaacttctcaagttcgtcaaaattcggttgaatattgtttgtgtggatcgatttagtggagacagatttgtacaagaaaccatctttgaacttcaaattatcaacccactcaaagtactccccagattctttatctcgcctccgttccacacgaatatgcatctccctgtttacacaagattagcaaacaatgacagaaacagttagatcaattcacaaggagaaacatgtcacctcgcctcatcgatattgaagaatc

SEQ ID NO: 5663 - DNA, 577 bp, Zea mays
cgcagcgagagaaatcagcgagaggtaactagtgagatgagatgaaatgaaagagacgggcggctctccaccgtgctgcggcacgcgtatcctgatggtgtagatgggcgggtcggctttgccccgctcctgcagcgtcatctgcctcggctccccgccgcacatgatgggctggttgaagccgccgttgaacgccacgccgaacacctcgttcggggccatcttcgtcgccgccgggttgtagaacagggtcagcccctcgccctgccaaccatcccacgcacgcacgtatcatcagcgctagctagaagaagcaggatccgatccaatccgcatcatccatggacacggactcgacatttcgaccgaccgactgactcaccggcgagggcgggaggccgctgctggtcttccagtagaccggcgcccgcccgagctcgaactccgcccacgtcggcagcgacaccctttgcagttgcaagtcggtcggaggtcacgcacgcgcgtccagcagcagcagcagcagcatcgatcaattagctacaagagcagcagccagcttatttgttacaccact

SEQ ID NO: 5664 - DNA, 630 bp, Zea mays
tcgccatcttggagccttggaagatatatatgaaaaacagaaggattttgtaagcatttgaaactatagtacctgcttattaatgacttatttaaaagtttaaagtaaaagtgtcagtagattaagtagctccatgtgctatgcagatagagacatttatggctcagcagttcttatttcaaaggcaatggcagcggattcgtaaatatgcacaaaagctgggtatcagcatcatgggtgacatgcctatatatgttggctaccatagcgcagatgtttgggcgaacaggaaatcatttttgctggtatgcctcaattattttctcaaagcaatcttacttttattgtttgggaacttgtaataattgtgttatggttctttactgtgctctctggttgtaaaggacaaaaacggtttccccactttcgttagtggcgttccacctgatgcatttagtgaaacgggtcaactatggaacaggtatcaatatttttgtcgtccatattcggtgtatttattatcctgtaccacagccacagggcatctcattatcgcttacaattttgcagtccattgtacgactggaaagctatggaagcagatggtttttcatggtggataaagaggat

SEQ ID NO: 5665 - DNA, 540 bp, Zea mays
ctcttgagtctaggcatagctctgcagaaggaaagttgggagcagctcgggaacatgcagcatctgctcaagatgaggctgcagaatggaagaagaaatatgaaatggctgccgtgcaggctaaaactgcattggagagactagcatcagtgcaagaacaaattaacaaaattgcacaagaaagggaaagttctataagggcagaatttgcctcacatttggagggaaaggttctctctaatctatctttcaatttttttttatctttttgatgtctttcggtatgatgtttcatgtgtatgacaacatctcgttactgacaggaagaggaaataaggaaattagttgctaagattagagaagcggagagtgaagaaagtgtattgactgaacgcttgctggtagcgatgacttttctgttatttcaatcttcccttgaattgatgcattctgagatgcaagggtagttttataatgcttgaacattattcaggttgtggaatcaaaaacacaaggccacaacaaggaaactacaggctt

SEQ ID NO: 5666 - DNA, 246 bp, Zea mays
cgtcaggctggatcagatggaagcagtcagctgattctaaaagaaccttctaccaatgttgtcctagctgatcatgttacaacaaagaaatgggagaaaattgttgatttcgatgaccaccttgatgatattagcaagtaagtaaaatatttttcttacaagcacttggagatcatgcccgaaaaattataatattaataaaaaactagtttttgtgtgtgcgtgtgtgtgttttaagaggggggg

SEQ ID NO: 5667 - DNA, 1075 bp, Zea mays
  misc_feature (15)..(15): n is a, c, g, or t
  misc_feature (1042)..(1044): n is a, c, g, or t
  misc_feature (1068)..(1070): n is a, c, g, or t
taactctcgtcatcngatattgctggacttgatgtcacggtgcacaacttttggttcaattgcctcatgtaagtaagcaaggctgtagatttagcactcaatatcaaatttatgttttacaaccagtgacagatagccaagaaaataggttatctaatcgccaaacaggggatgagtatgttattccaaataaaaacaaaaaaaagttcaatataataaaaaatcatgatgaaataataatatggtcccagaaaatgacaagaatcacaaagcagtctcacgaaaaaaatggtaggatccacaagatagtgacaaggactgcttcagagctgatctgggtcaaaacttatatttgttcgcaacagtatagatgatgatttgaagtgactagtaaacatagcagctaatcaagaagttgctatgattgagatgtgtaacaatcagatttgccattttgttagccttcgatattaactggtacagatccagtcaattcacactttggattacaaaaatggtataaaaattgcattgctgaaacaaaaacaataaaaaacagattatattcggttaaggagttactcacgcctttgcagttcccagaaggattttcatgcgagccaaccaagtgagagaactgtactgggacaattccccatggagccaactttcaagatttccattattcacatactcatacacaagcatcctggttgcatatacatgtcaagtgattcctgttaatgacttccctttctcttaagtaccaaaagaataatgcataggacatcatattttagagaaaaatgaaaaaggtgtctttgtgttcttacctttgagtaccctcaacacagtaacccaaaaggcggaccaaattcttgtgacgaacatggccaattgcctcaacttccactctgaattctctctcagcctgtcctctgcacatgacagacaattccactgtaagaaagaaagcagaagggcaaaggcatgtactgccactgcttcaataaaaaattgctacagaaaaagctcacaaatnnnaaggattttctgacagcaactggnnnccatg

SEQ ID NO: 5668 - DNA, 470 bp, Zea mays
ggggtgtgccaagtggtggatggcgctgcagatcatggagaagctggagatcgtgcgcaagatggtgtcgagcgcttgcggcggcacccctcttgacagaggcacggtgttcgccaggaaggtggacctcaccagtgtcgacggtcaagcgctcgccggccacggcctcgggagcaacctatcagttgaggacgttcatggcttcatgctgtttacgatgaatataatatgcttgcatgcatgttgtttcttaattttgggtgaaacgaacacaggtggtgatcttcgtgctgctcgacaacgtcttcagcaacgtcaagtcggacatcgatggcatggtctctgcttccactccttattagccatcgtcacctagctacctacgtgtctacaggatcgagatttgcagtcactagcctcaagtctccaagtgtgattggatctctgctgcagtgctcttactactgccc

SEQ ID NO: 5669 - DNA, 358 bp, Zea mays
gaagcagcagcaccttctaacgaggcctacaagtgaaaacccaccgtttcagtaggttccattgttcatagtagcctgacatccttgtgctgcttcctgctctgtaagcccatttgttatttaattcattcaattagttgaaattatacgctgtcgcactggctgatcaatcatgttgtagaatggtccaggaacccccttcaattctgtttgttttgggctcgtttcctgtttctgtgactggtatcatcagggcatttgggttttggagtgaaattctctggtggtgctttgttgttgttttagctatgttccttcatggatcctctctttggaacacacatatgtattctcgtgc

SEQ ID NO: 5670 - DNA, 1129 bp, Zea mays
  misc_feature (1124)..(1124): n is a, c, g, or t
  misc_feature (1126)..(1126): n is a, c, g, or t
caagagtggctaagtgagaaatatggtcagaatggtggtgatgaggaacctgaagaatctgaagcggaaaaagaggaggtacgcacctattcacttgtctgttctgcattttcttttctctgaactttaggaactgggttcagctgtagcaagtggagacattgaattgcctgtggttcgtgaaattaatgcaggcttgttctggtatgattggtttctcgatctgaaaccactgtttggtggttttgtttagaatcctgctggatgctgcattttttggaatttagtgcttgattggttgtcctactgagccacttacgcagtcaaatttcaaagttacattttgtaccatgctatcatcatatcatggattattttcctttcaggaaatataatttataaatgactgtagtatttgctccgtgtccgcgtgctaggttattataccgcatggtgaagctgttactgtggagagctttctggcttggagagaacgctttgaagctgagttggccttacagcgtgctaagtaaaatttgtattttgtttacatattaagtttttttatgatcagatggaatctcttgtttacttgtgatatcttccatctaatggtgtttgattcccatattatataagtacccaaatctgtgtttagatgatcttttgcattttctgggcacacagacttatgccagattcagctcttacagccacaaaggaaaagaaactcacgggacggcagtattttgaaagtggaaggcatgcagtggtttgtatcccagataatactacctttttgttatcccagataataaaactttcgtctcaaggcttgtttgatgcactcgcattcagctattcacatcaatctatgtgtgtgttggagttacttacgtgtcttttaagttctactttacatgaagccatcttttcagaaaggagcaagcacagttgctgatgaagatgaagaagaggaggaagacattgatttcgatgatgattttgaaggtaaaacttctggaaaactctttgtttatgacaatagatgtactttgctagtgcaaccaatcttacaaaacttgctgcctctaatttggtacagacgacgaagaggacatgcngngca

SEQ ID NO: 5671 - DNA, 496 bp, Zea mays
aactaatcaaggtccccgattccccatcatgaactatttctcagtcaaatccgttgtttacaagactgttcgttcattatctcatccatttcagtcttcaaaaaaaaaattaacaattgcagggcgacatcagggccttggaggacctcacgtatgccaagagaaaggacttcatctcccagcacaaactccccatcgatgagctgccgatcatctccttccacaccgaagccagcaccgcgcccacagcgctcgcgtcgctgacccgtgtcgcccaagccgagctcctcccatggctacccctgccacggttcttcctgtctgcatccgagtttgtcgagtcaatgctcgcctctctgaaggtccccgtggttgcgcctgtgtctgcagccatggcggtgacagccctccacctgcggctgcgctatggggagaggagcgacgggctggtgacacggcgcgacgccgaggtgcctgggtcaggggtagttaaacc

SEQ ID NO: 5672 - DNA, 388 bp, Zea mays
cgcggcgatcagtaacacatagtgcatgggatctttcagcttctaaagatcgtgaaagacgcgggtggcatcctgtaacatataaagtctctgatgctactccaagacttataaaatctataaaggtatatagttttttttccaaatctggacactatttttgtttaggacttatatatatttgctaaaacaacttaaaaaatgacaacacttttggcgccagcaagcttggctagggttgttttatgctcaattaaaggggaaactaaagggtccatcaccctttgtattttggtttgttttgccttaatttgacaagtaatgcagtcacatcacttgctataatgaataaagcaacaagcaccttttataggaaaaggaggtggag

SEQ ID NO: 5673 - DNA, 487 bp, Zea mays
cgcagctgttcaaggtggattctcacagggttgccttagtatgcctgttgttcccttgacagaacagcctctttttgggcatgaaagacagccaattgatccaagtgaccaacctttggaatttaacagtaggaaagctcctgatttggcagtacatataaatgtcaattccaatatcccagctcctcaaacactagcacctaatcatgatgtagctgcaacctctacacatccatggacgccatctgctacagtagggttcctgcctcgagctcctgtgccaccacaaacagcacaggtgtgtacacatgtttgaaattgaattactgaccttttctcttaagtccccttacacgagttattctactctttttgaacctacagatggatccttctgtgcatgctgcaccactttttggagcagcatctagttctagttatgttccacctgcagcatttggtgttggtaatgtaacaattcggcaca

SEQ ID NO: 5674 - DNA, 385 bp, Zea mays
cttgtcttgcaaagatttctgcaactaagaaccatagagaaactggtgaacttgctggaccgcaagtctttgaagaccaaggatctagccatgcaatttctggtggacatcacggaggttggaaccaaaccctgtatcgagagaatgctcgcttctcagatcgtcgagaagctcgtggcccttgagaaagccggtgatcctttcggcggcgcggtgtcgaggtacatccagggattgaacatgtgcaagaaactccagtctgctgagagggcggtgatgaagcaacatattctgaggaaggtgcggtcggcagtgagaggtcataagctggaggccatcctagtagcttctgtggaggcctccatcgctgaaggcttcaaaggag

SEQ ID NO: 5675 - DNA, 390 bp, Zea mays
agaaattgtgacagccttaaacaaggaacttgaagcgttagcgaaacagttgcaggttgattctgaagcaagaaaaagtctcgaatcagacctggaggaggcaacaaagtcactagatgaaatgaacaatagcgcgctgttactgtctaaagaacttgagagcactcattctaggagtgccactcttgaatctgagaaggaaatgctacgcaaggctctagctgaacaaacgaaaatcacaaccgaagctaaggaaaacacagaggatgctcagaaccttatcacaaggcttgagacagagaaggagagctttgaattgaggtgtagacatcttgaagaggaattggcgttagcaaaaggtgagatactgcgcctaaggaggcagattag

SEQ ID NO: 5676 - DNA, 359 bp, Zea mays
tggaaagcagcccattgaagtcccaccgaatgttactctcacattagaagagcagtttgtcaaagctaagggcccactaggggaattatctctcagcttcccaggtgatgtgaagattgtgaaagaagaatccggtaacctgagagtttataagactgcagagaccaagcgggcgaaccagatgcacggtcttttcaggtagacaattggaaactgtaatatgattttgcccatattagtttttactgatttacttctcataatgtgattcactgtttcactgcctttattccttgttgtgtatgccttctcctgatattcctaaaagcaactcgctaacttctgaactgtctgcttaa

SEQ ID NO: 5677 - DNA, 400 bp, Zea mays
ggctgagagcgccgtcgcagggaggtgtggtggctatggagtttgcagccagtatcagttcggtgagctcatgagctcgtgttggcaacctgttacgcggcaggatccttgttccgagtccgagtcggattctagtgaaagctcttcggatgcgtcgatcagtgacatcataccgatgctcgacgagctgaacccgcctgtggacttgggtgctggccacccttcctcagccttcagagagaagttgagcgccggctcatcggatgatgaagatggctcggaggaggacaataaccttagctcagatgaagatggagaagaggaagaggaggaggaagagaaaggtgatggaaacaactggaagggctctgtggatccaaactctctggaagctgaagaa

SEQ ID NO: 5678 - DNA, 933 bp, Zea mays
tactgccccccgccccccctctttgtgttctagctaccctagtttataacatggaattccttgattgttttcggcaatagcaggttttgtaaatcaagtgcagaattaccacattaagctataacaggttttgtaaatcaagtgcataattaccacattagtgaaacacagttgtttacttgtttttctcatttgacaacgaaattgcacaaccgtcgccaacaggacgatactctgttactagaatggttgtgaatgctgtttgccccattttccatcgatgttttagcaagctgatgtaatcaaggcatatctgattaggttactatcttctgattaatcatgttgtaggcagttgctgtatgctacattatgtttccttatagtatcatcggattaccaattccatgttcaactaagatatgccaaaagaagaactcatgtcaacttgcagttatgttaccaatttcatgtgcagctaggatattgttgttgcctgaatttgttccactggccccatgtcactgacagacttattcctctaggaagttctttcggagcgtccccgcgtggtatcctcgcaggtttcccatgcctgggacctgcctcagaacacatttggcgcggcgtatgctcagttcatgggatcaaggaacttctcaccagacgatcgcccgcctgtccgtttcatggacaccgatgagctcgcctacgtcgcgacacgtgctcgcgaggtgcacgacttttggcacgtgctgtttggtcttccgacgaacctgattggggagaccgccctcaaggtgatagagtttgaacagatgttcctcccaatgtgcatgctgtcagtcgtcgggggctctgcgaggttcagcgataaacaaagggcgctgtttttccagcactacttcccatgggcaacaaaagctggtctca

SEQ ID NO: 5679 - DNA, 520 bp, Zea mays
tgctgacaccagttgattcaagtgttgagacagaagtaagcagcatgcactatttattttctacatggctctctgattcagtcagtcttctcctagctatgcatgtattctttttaacctgttcagaaaatctatactcaaccttttctgcctgtaaatataacataatcattgtgttgtattcttttttctgcttgatttggtaggtcagaaatgcggtcagaaaagtagagatgaagagcaaagaatgtgcctatcaagcatggttagggtactacaactcgaacaagaccattggtcgagataagtccagacttgttcaccttgcagaagagttcagccaaagcatgggtcttgcagttcctccagccataccgagaaacattcttcgcaagatgggccttaacaatgtccctgggcttcgttcatcataatctcgatgtcacgatatcaagcagaagacgtgtgctacagcacagtacatgcatttgaccagccataatgctgttaacttcgtaaa

SEQ ID NO: 5680 - DNA, 380 bp, Zea mays
aattaattttggtggttgacgaccaacacaaacacatggactaactagttagtctagaattcatctattacaggtgcataaggttcaacacaaaccaagaaagaaatcaagttagggacacaatttaattggagcaaaaggacttgagtgcgctaatctttggcgcactggacactgtcccatgcgccagccaggcgccctccgaagcagccactcttgggaagttccagggcagcctccgctataattcaccggactgtccggtgggccaccggactatccggtgagccagcggagcaacggcttcctgcacgccaacgatcgactgcacagtgtgaacaatgatgaacagtgccacgcagaagtcagaggagcaaagt

SEQ ID NO: 5681 - DNA, 375 bp, Zea mays
atttgactacctgagaggtggtgaaatgtatcactgtaaatcaaatttggatgtttattgtgcaccttctccaaatatgcaccgggcatcaaacattgacgaccatggttcagtaggttgctctgatgttgctgcagagggtcaacggtccactggaagcacagaagaaatttttgtcagggatgggatcctagtaggtcacgaatactgggatggcaaatacatttgtggcgatcactcactgggtccagttgcccttttctgtgcagattattaccattctgggaatgatgtcgacctcagtgaagctacaggtcaagagagagagctgtcgaacagagatagcacactccaccagtcgcttgtagtggaagt

SEQ ID NO: 5682 - DNA, 1068 bp, Zea mays
  misc_feature (1025)..(1029): n is a, c, g, or t
ttgagatgtcgatcattccttaacaagtaggataagatcgcacacagaaggtaatatgttggtgaatatgggtacgtccttgattatacgtaaatttaatccgagtcctagtagaaatgagttcaagttaaaggccgcactgttggaaagggctcagaatataatgttacatggtcacaagcgctaaacgatggaggggggagaataacagtccacccattagattgggaatttcaaattttatagaattgtaggtattcccattagaccctatgttgatagaatttatacctacagccagctcgtgttctgtaaattcaaccttgcttttggattttaacctctagtgtgtgtggtttagtttctgaaagcaaatggaatatatgtggtccaacaatactgccaaatgatatacagccatttaccgacggcctacctgtgtaattttcggtaggtcactgttgttaaattgttcaacttgtgccaacccaaaaccagaagccctgcctgttcggctggctggctgcggtgtagcagccaactaactgatctgactatctgaggaggcaaatagtagtagaacgctagcaatagtaaaaaaacaacagcaacattagcttagaatctgaagcgctaagcttctgtattacctctctgggaaagcctccaattactaatcattggagtaaggaatttggtgcaactatgcacctgataacctgtttccacacaataagccatactaatcattaatcgcccccctcagaaatctctaaaccctctctcaacctgcagacaccgctgatgttactgcctagtttgggaacgggtacgctccaacaacaactggtgacgatctcctgcagtctctgtgatcatccgcatctacccctctgctgacaattgtgtgctgaagatgtttgtttttaatcagcttagatagctcagcgcacagcgctcttggaaactggtgatctgaatatcctactggtactttcatttctttgtgataagattgttctcannnnntgtatcttttaagatacacccccattggggtttttttcc

SEQ ID NO: 5683 - DNA, 402 bp, Zea mays
ggagctgctgttgctacgaccaagaccgcatcaagagctcgccttttatgcgctttctttctccgcccgatcagaggagccgtgcgggtgacgcgatggaacccactttgcgtttgcgacagggaggagaaaggaaaagtgcagcgagagaaggttaaacacacacacacacacacaataaaattaggtcggattcgatcgaatcgaagcccggggatcgggggaaccaaggacacttgttgccgagcggattgattcgagctgagcgggtaaattgacctcaaatttgtgctggaatctggcctcttggagcttggagaccgcaggaggtggccgagatgggatctccggagctggaaaacgggcgtactggagcgagcgaaagatcaaggaatgatccta

SEQ ID NO: 5684 - DNA, 398 bp, Zea mays
cacatccaggtcctcctcgacgacgccagcgtcaccctcggctccggacccggcctcgggcgtatcggcggggcaagctttggggattacttcgtcggcccaggcctcgaacaactcatcgagcagctcgccgagaacgaccccaaccgctatggcacgccgccggctgccaaatcggtcctctcctcgctccccgacgtcctcgtgactcatgccatggtcgcagctgcggagggcgctgagtgcgccgtctgcaaggaggatttctcgcctggagaggtggccaagcagatgccctgcaagcacatctaccacactgactgcattgtgccgtggcttgagcttcacaactcgtgccccatctgccgatttgagctgcctactgacgatcctgatta

SEQ ID NO: 5685 - DNA, 974 bp, Zea mays
cgagtgtttatgtatgcctcgacaaactcggtgcgttctttttttgctaccttgtttatgtcaccaactagcataatgtgctactgcccagtgataatataatcatgacatgccgccagttactactgctcatggtcggcaccatactaaagtagttcttctacatgcatacaccttttttgaggggctcattttgaccattaaccttctttgaggatgtatctggatgaaataaaaaataaattttgtatatttattaagcatgcatcatattactatactgcgaactttagaactttgagctgacaaaaagactttgtactatacaggccaaatttctagcattgttgattgtggttccatgggtgatagattttctagtgcatgactatgttatgatgccctttttagagaggtaattcatctcacccactcagtatcatcccttcttgttagcgaagtgctgagctctgacaagttataagagtatctctttttgctcctgtcatgcaacaatgtatgctaaatgcagaatgtattatatggaacatttcctaataacaggtatgtccagaaggtgccacttgcagctgagctactcgatgtaaggcgcagccaaaagctgcagatggttaaagacctaaatattgaaaaggcaagataccgtcttgaagtagagattggcaaatctcctccactttctgatgaggaggtctggcatgagttgcgggaaaaagcgtgagcaaatgctgaataccatgctttcttgccaagtcattacatttataaatgcaccacctatcagaatcctatttgttctctgccagtatgaacattatgtgttgtccagtaactacagtctgttactctgattgttctcaaggatttccttctcttctttatcaggatagagttgagggatgattggaggctagaaaatcgaaatgctttcgcaaatatatggtccgatactg

SEQ ID NO: 5686 - DNA, 376 bp, Zea mays
gtaggtgcttctcacatccccaacagctaatggtatcaataaggttcagttgacacagtctggaaccattaacaaggagtttttgatccctggatctcctcttgttgatacaagtttccctccaagacttgagatatccgacaatggagcatcgaatattcaagagttaagcatgcttcaagacaaggtcgatggtgatggcacaacagctgatactgcagctagaacccttctttccattttccagcatagttctgaacgcattgctcattgctttggaagcagcaaccagacagcagctcagaacgtgaacgatgagcctcagccttcattggactcgttcgagcaaaccgtgttgaacttagaggagatccaa

SEQ ID NO: 5687 - DNA, 370 bp, Zea mays
gaagcagcggcacgtactctattctggagtaatagtacgtatgtaggtagcactactacgtcatgctcttcgccggtttgcctatatattggcctatacgtactctcgcagcatatctcaatcagaactcagaacacaggtcaagttcaccagaacgcggcgggttctcgatcaggcagcaggagcgcagtcgtagtcgtcgtcgtcatcgtcgccgtcggtctctgccatccttccccgtgcgctgcagcacccatcgcaaggcgcggcgtaaaccgcacccgaggaggaggtaatgctgccgccttggacgaggtagtagctagccgccgccaccgacactactgctggtgccatcctagttagttta

SEQ ID NO: 5688 - DNA, 399 bp, Zea mays
ctgaaaaaagaagcgaattcattgggcaaagccttatatatagttgatacataaggattcgtgtaaaatacatttgcagtccggtacagtttttactttttagccttgtgccctttgcaaaaaggactacaagaatcatgccttttttccggcgtaagctgctgttgacttgttgaatagtttatcctcagggagtttagactaatattaatgtggtactccctctgtcccataatataagacgtaatcaccttttgtccttgtcccataatataagacgtgctctctctaaatacgcgtacatcgatgtagtggtatagagaattaaatacattttttggtctttgaaccagaggtagttacactttatatactgagacggagggagtaatagagttt

SEQ ID NO: 5689 - DNA, 590 bp, Zea mays
tactctaagagagagagttctgttgtttactctctctgctttctgcctcttattgtttgtagagtaaaatttaaaataggagatgtgattagtacgaccgctgaagataaccttattgggcagtaaacaatcccatgaccaaaacaaaacatgaatctatgtgcttttatgcctgtttgttttctatggtttttaacgctgctttatatgtgcttttgtttttgctgtaggtggcgatgatggggtggtagaagagaacagatctactaggctagctgtagcttctcaatgcctgtatgatattttgatccagtcttctgtggaaaaagataaaataacacttgggatctgtatgtgttattagcccctgtggtactctgtttgtttccaggtccgcagagtttagggtttagggtttctgtagatatttgagttaagaggagactaagccatgaagtaaaagagatgcctagtttttttccccttcaatatggtagccagcattgtatcatgtagaattttaatccaggacagaagtggttccatgtatatgggggaaaccaaaccacaccagaagctatcagctatgc

SEQ ID NO: 5690 - DNA, 812 bp, Zea mays
  misc_feature (751)..(751): n is a, c, g, or t
tatattttcttaattcctgatgtcaaaaatatgttaaataatatcatttgattgtttgcttatgtttctttgtagatacaccagtttcatccaaccaataatagcatcaaaattgcacaacgatgtaggtgtctaaaaatagcagctataccttgtgacatttctatataaacctgagtgacttgatttctgcagatcaaagcacacaaagacattgcacattttgaaaccgcatatgttgtcaaactacaccgtatagcgacacttgcacctccacaacaggtgagagatcagacccgccgcgtgtgtttcattggttcagatcatatcacagttttacacattgccatatttcattcgctatttgtgacatgaaatttggtgatcacctttacttgtgtaggtttttactttcacccatccaaatttctcaccaaatgctagcaaccaaaggtacaccaagttgcaatttgaaatgctgccagatatgggttcatgccttgtgcatggtatgcaaccatactctacttgcaatttattattcatattgtttattaccatagataaataagttgtccctcacacgactatcccgcatcaatttggcaggatttgctggctattttgactctgtactttataaagatgttcatcttggaatcgagccaaacacagctacaccaaacatgtttagctggtaacctgcaacctgatctttacaaaagctggaaatagaatctctcaaacctcnacatcaataactgtatcttcatgccgtaacactgtcaggttccccatcttcttcccattga

SEQ ID NO: 5691 - DNA, 372 bp, Zea mays
agtcctcctcgccatcattgcaactagctagctctgcttcttcgtccttagctctcgcacataatctttgaagaacgaacaccaacccaccaacgatcacacactactcaatccatcgactgacatgggcagcctcgacaccacccctaccgccgccttcgcagacgtcgccggcggtggcttcgagccgctcaacgccgacgacgtgcgctcctacctgcacaagtccgtcgacttcatctacgactactacaagaacgtggagtccctgcccgtgctgccgggcgtggagccgggctacctgcgccgcctgctgcagtccgtgccgcccacctcctccgcgcccttcgacattgccctaaaggaggtcaa

SEQ ID NO: 5692 - DNA, 570 bp, Zea mays
cgcgctcccgccgcaccgccgagatcatctggcaggggcgtgggcgtgggcgtggcgacggcctcatcccggaccccgacctccgcgagatcgatctctactgtttccaggtctcaattcctctcctccttttttctctcgtcactgtttagttgtttgtgcagtgctggcagactgctcgtgtgtggcaaactggcaatgcctgcccagttccgtctgcttgttacttcctcgatgcgatgctcgccatgtgctcgtggaaacgccctgtagtaacggtccggtgatcctggtctccagggactcctgaagcgcgaagggagggagaggtacggtcctctgtaccggcagtggcagaagaacgcggccgagttcagcatcgacggccactacccggtgcaggagctgtgggaccgcgcacggagctgctgggagaggattttggcgcaccggggcaagtcagtgctcgtggtcgcgcacaatgcagtgaaccaggcacttgttgccacctctttgggtggggtgcatcctgcatccgagcgtgggatcggagttcattgcgtgtctaag

SEQ ID NO: 5693 - DNA, 384 bp, Zea mays
cgcgagccgccccccacggaggcctcgacgcacgcccacgcggtgttcgttttccggttcgaactcgccagcggcggcgaggagagcgaggcggatttggggaagaatccctcccccagcaaggacgcaaggaggaacacgggcgtttggggaggctacctcgcgcggtgggggcaacgggactggagcgagacgggcagcaacggtgagaggaggaagggcagggggcggaggctggccaaggagagctcgtcgtcgtcggcgtccgtggcatcctccacggcgtcgtgggccagtggctccacggtgatggactgggccagccccgaggaggtcgagatgcagcgcggcgacggcttctcgctgctgatctacgcctggaag

SEQ ID NO: 5694 - DNA, 387 bp, Zea mays
caattccgcctttgggagattctgccgggagaagtatctggttgctgtgccaagtactatggaggtatccttcctgggaactctggaccacagagcatttgtcgaggcgggcggccatccaaggacgcagttttaccagacatttgcgaggatggctagatctgtctgggcattgctcacggttgctcgcctcttgaaaccaagggccgagatgttcttcgtcaagagcggcgttcggttccaaaggaagcacatggaaagcgtaccagctaggctgaccgcggaggaagcaaagatcggtgttgggtttacagtgatgccgggctttaagatcggatgcactatcgtcaggtgcagggtgtacctgtctatgctcaacgcaagaga

SEQ ID NO: 5695 - DNA, 361 bp, Zea mays
ggtaactgcaaccaaacaattcggtacacccatacactgtaccatcacgaaattttataacagtaccaagcaacgaatgtccaataaacataaatctgtacagcagtattcctcatagctgtatgctatataaagctctttactttcgttgatgatgtgcaacattctcgtaccatctcatattgcacagttcatttgccatggaagtacagatcttgcattcatacatctctctgcaaagaacagaataagcacctgtactgaatctcaatttggcaagaaataattttgcttcctccagaatatgcacattttccacaccgagctaccaataaatgcaatacaggttgcaattcggatc

SEQ ID NO: 5696 - DNA, 360 bp, Zea mays
catcatacccacatattacgacatagtgtcctgcaaaggaggaatacaatcacaacactttagtggtaaaggtttgtgtttgcaatgtgttttgtcatatatatatagttgtttatatgtgggaaaaaggaaaacatggagatttgaactccgtatttctaccagacaagaaaaacaagacgtggcatgtgaactgtactgtacacatgttcattagttatttagctatcattgcaaaaataaataaaataaacaaagcaaaactatgctagcttcttttgctgcaaaaatgtgtattatccagaattaaactactgaagccacttgctggtcatcaataattctgcagtgctacaatac

SEQ ID NO: 5697 - DNA, 172 bp, Zea mays
gatgaagccctgcaatatgctgaagatgatgaagctgcagatgatttggaggaactcccaagcccagatctccttactcaagccgacatattgaaaaaatattttggaattgagtatgatagcgaccagtcaaggggttgttgatgtttagtcctaaacaacacgatatgag

SEQ ID NO: 5698 - DNA, 813 bp, Zea mays
ggacatcatatcctttagagatattttataccatttatactatttgcatccataagcatagtgaacacctgaataacacccaaacacaaggaaccacatacaaaagcaggttagtaaagcattacttgcagtttatggatattatgcccaacaaggacacaactcaggtgcatattattagttagatgatgcatgtgcgcctaaccgcacaggcacaacctcttcagtacgaaattttggatggacagattatttatctaatactaacttgcagaatataaactgacgaattcacaaaaaaaagacaccttcatttagttacacatttggttattgtgtccttcagagcccaacaatcgaccgggaaatgcataggaaggagtgaacaacaatccttgttgctgatgacaaataccaacctctattctaaatggccaactcttagaatggtgccacacagattttgtaaagaacaacaatattccttcgccattaaaaaacaagagctttgaggactagctaaaaagcattttggattggagagaaggacctaccccgtcgtggtgttgggggagttcaagaacgtggcaaagaccactttgggccagacgttgaggcggagctacagtggaggcggagctcagcctaggcggaataggggcggggtggatcggagcgcggcaccagcgaatggggcgacgaccggatgtgggcgcttctaggcggagtagcatggccaggcgaagtctccagcgcatccgccaccactgctttagcaccacctccttgccgaaccccaccacacggagctcc

SEQ ID NO: 5699 - DNA, 347 bp, Zea mays
acaaacatagttgtactttacttgatctcgatgacattggactgcaaatatatgcacaacaattgcctcatgcacacacacataatggggccgcgagttgtagctcaaccatcgtctctggtttctttctaggtggagatggttaaaattgctggtcacttataattaccagcatcttatacgtcattgttgttcatcgccaacttattcaagtttgaaagtagaacactgagaagatggctgagaaagagaatattctaatgcagagatatgagatgggaaagttacttggaaaagggagttttgccaaagtttaccatgctcgcaatattaagacttcagaaagc

SEQ ID NO: 5700 - DNA, 748 bp, Zea mays
ccacccttctcagaacaactcaaatatgttaaagaaaaaactgaaatgtctgaaagaattttatatttgggcaattagtcttcatagctgaaaacaaagacttcaacgaaaggcaaaggccaatgtattcatactgcttctgaaggataatcatttggtgtatagccagctctaaaatacaccacagcaactttctggccacctctgcatttttaaaaaaaatgaacattaataagcatactgaaacactaagattctgcttaaatgctaaccataaacccagcacactgaaaggttaatatgatgctcaaatgctaagcataaatcagtaatcaatgaggattcatacacaagaagagttccatctgggagaacctggccttccgcttccacctgcgataaggttttccttatagttgttatgccatgtgtaataaattgtcaagggaacacaaatttgatcttatgacttctcatattgcacatgaacaaatagttaacaaacacttaaaactgatcccaaaataatgacaagactcaactcaaggatgggaaactaaaaaaaggtatatgagttacatgggttaaaaggacaactgattaactgattaaattatagatttgatcattatgaaaaacatgaaggcaaaacatagaaggatatgagtcttgcaaatgtttggaaagccagtattgatcatacatatttctctcttctggctgaacaaatcatcaaaaaaaaaaaaaa

SEQ ID NO: 5701 - DNA, 759 bp, Zea mays
accgctgtgccgccggcggcgaggaagggacgcaggaggcgctgcgtgagcgagcagcacaagtggaagcccaagggagctgtggacgaggacctgtacaagatctccccgcagcttctctgcaaggtgaagaaggcaagtgccctgtaatcaaatcctccctagctagtttgctctcagatcagtgcgtctctcgctgcatgcacccaacgtgtagctaagtggggttttaccttttgtctagttctcgtcatgtgactgtcctttatctagcctaagctgacccctttgcaagtagcttttgtttggatagcattagatagaacatctacatttgccaaagatgtgacctttttttcaaaaagaaagaagcttaagcgcttcatttttttcacagcatttggacggccttttgtcaaaggccatgagcgataaagctggactgtaaattcaagcgagattttaggcgaggattttattctcatgacctgttcttcgttctgcagaagaagctgctgaggaatttgcttggagggtgcctcggcttgggctgcatcgcctgatagtgagagatgcagagcttaataagtttcttgaaagttcgcttgcttggttttggtgctctggagagagttgtatagttgtctacgctaatatgagattaatggaaacttactactgcttctgcactcgtttgaatgtaacactagcttgcattccatctttcctacggttgcttcagtgcctaactaagggctg

SEQ ID NO: 5702 - DNA, 1108 bp, Zea mays
  misc_feature (1103)..(1103): n is a, c, g, or t
gcatggatgaacaagagacggagggagacagatgcaaacatcgagactgggtaggtgtggcgtcgtgctgatcttcctcccaccttacttgaccatggaacctttagagctaaaaggcaccaggcactgattatattaggttacttgttaattaacaattagcatcgcgattagactagaccagttggttactaacaatcaaacaattggtatcgagatgtcaaaggcagtcacctttagtgggatcgatactgttcttttagtctattcaattcagtagcagtctaatcagaagacgccacttgtttccctcgcttcaacggcgctgtcacgggttcagacgtgtttctatttttcttcttttccagccttacttttgattaaactaattatttgtttctggtcttcgttacgtgtactttctcgctcctacaatttttttcgcgtgtgccatatgtgttcccggaaaagtttcctgtccctttcgggtactccggatggttcccattttttttctttcataaaagttctattttgaagcttggagaacagtgatgtacatgtactgtgagctatttgatttgattgaaggaaaaaaaaatgttgctgcagtctcctcgatcttcagagctgtgatgtgatttgtccagatacctacaaaaacgtaccaaatcctatctttttgtcctacccattgtttggttcccatgcttccagaatttatatggactgtggattttaatggaagaaaagaaaggaaaaatatgaatcataaactactgactcatgtcataacattgactttttgtgtagggttgttatctgtctttgtagcagaagaaacagtcctaaaaaagaatggagagctcctcagataggagcaacgtttctcaggggaaccacctgggttatgcgagaagcacatccatggattccactggtcctcagttagctggtaggtctagctcaatgttgagtaggagaagtagcagacagggctcaaggggatccatcagcctctcaagggagatgggggactccataatgagctcaatgaggcattctcttcagtcggcggatcaattgctaggagacatcgatanctcag

SEQ ID NO: 5703 - DNA, 487 bp, Zea mays
acatttgtaaagggtcaaaaacaccataaactcttgctttaatctgccagctatagtatcttacaaaaggagaaaaggaagtatcttctacattctagacagagaagcggtggggatggtggtgcgttgcctataacatcagggaaacaacaaaagatacagcttagaactcctcgtctcaacctcagcaaagaaaacaaaaaattcctcaaaataagccgcgcgaagcgttagggagtagaccaccaagatccaattgacacctaaattgtctgggataagttagcaataaaaatatattcatggcaatcagccataaggaaattaacaagatagtaaccaggacaataaactatttccgcatgaaactacagaatcccacacagcaacacagagtttatatagatccgaaccttaagtagcttctgaagaactgcatgaaaaactactcatgtggtgaatgtttgccctcaaagtatgatctcaa

SEQ ID NO: 5704 - DNA, 409 bp, Zea mays
ggcgtcatcgttgaccgggtggaggagatctcggacgccgtggccggttttggtctggggaaaccaggcctcggccggggccggggcggtgctggcgtggacggagcgaaaacgcatcaggctcaggccttctcgcagcagcagctggggttcctgctccggcttatccctgaactgattgagcagcggcacagaaaggacggtacaccaccatatgtaacatcccagtttttgacccccctcgaagcggatggcaagaattcgtctttggggtcaacacttctcctgactgactgactgactgactggcaggtccgatttgacagcttaggaggtatacttgtgctgcgtgcacacactcttctgtatagtctgaaaactcgcggttccttgttggttcagtacaggt

SEQ ID NO: 5705 - DNA, 866 bp, Zea mays
cttttcatcatctgctctgcttgttcagtgcttggtaacttttatagcctatttgatgagtcccaatgaccattaaagtaattaggttcgttaatcgttagaatcatgaaatgtcatagtaagccttttttatgtatctcttttcaggaaatgcactgtgtaccactgatcagcacattattttagaactatttacaacaaattatacaacttttgaacttatttttattgagatgttattagaccttatatataacatgcttttcattatattatatatgtttgaatactgaatttcatggtatttttttttaacttgtataccatattgtgtatttacttaattgcatattatagaaattggctaggactatcctggccccccactggccatggcgtgtgctgcttacagcatcagaagccctctcaagctcgctgtaaggcacggctcggatgtgttgagtagcaacaacttgtgcaatggctttaagtcttcggtgtcttacctcaattctcaacgttggagcagcaactgctcagccgtcacaatgcggcatgtcgcatcccattgtcactcgattgttaagactccagcaatgtggccctcaaaagcttcagcaactgatgcagccacagcttccggtatataagatactggattattttgatttgtcatcttaaactctgtagtcgaaaatgaaacattgtaatgtaaattcaagagcaagttggcttgatacccgttcattgttttttctcagatgagaggataactgtactggtcattggtggtggaggcagggagcatgctctttgttatgccttgaaccattccccatcatgtgctgcagttctatgtgcccctg

SEQ ID NO: 5706 - DNA, 372 bp, Zea mays
gggtgttcaagcgatagtaagcaggctgctttctggttacttccatgatgaggacatatcgattattgccgaagaagatgatgggacactagctagtggcgatggtgcaactttgcttcaatatgttgttgaggctatcaacggctgcctggttgacgctccaaactatgggcggagattccctgagaaaaagctcggtgctcatgatgttattccagccatacggaaatgcagctctactggaggcctgaaaggaagattttaggtgcttgatcctgtcattgacacccttgggttcgtgataggggaccaatatgctattgctctagccttgattgaagatagagaagttatgcttggtgttcttgagtg

SEQ ID NO: 5707 - DNA, 594 bp, Zea mays
agtttgctgacattgggaacacagtaactatgcaatctgaagggtgagaaaaaggagctataactatttaattttattttccttcttatacatacatttgtgtgacatagttggcattttctttacttcggttcagaggtatattccgcatcttagactgggcggatattattaatgcgcatatagttcctggacctgggattgtagatggcttgaagctcaaggtatttcatgacatatatgcataggtcttacacaattactgagttaaagataatagttaatgttgcagctgctaatagctcatgcattgcgttgctcacagtaactgttgtcttctggcattgaagggtttgcctaaaggaaggggcctacttttgcttgctgaaatgagctcagctggcaaccttgcttatggagactacactgctgcggctgtaaagattgccgagcaacatcctgactttgtaataggatttatatcagtgaatcctgcatcttggtcaccagcaccgtcaagcccagcatttatccatgccactcctggggttcagatagctgctggaggagatgcccttgggcaacaatataaca

SEQ ID NO: 5708 - DNA, 382 bp, Zea mays
  misc_feature (374)..(375): n is a, c, g, or t
cataggagaaaatgaactggcagtgtataaggtaaaatgccctatctgaagtagtgatatttatatatctggggaccgctctggatgtgacgcattaagggtaccttgtccctttcttgagatcaccagaatccgcctggagtcttgtgctcggtggctgatctcagggctttgtgatgttattacagtaatgtacacggtgtaacagagtttcttcatactgggagaatggttgtttgggtcttcaaacggttgtgttgttgtagaacgtggtggggggcgtaacgtcacgggctgtttagttctgtgcctgagctagccttctgatctactgtggactcactaataagcttcatgtgaaatgtgtagcactnntacgcaa

SEQ ID NO: 5709 - DNA, 267 bp, Zea mays
ctttatgacgtggagaccaattttgcaggtgagaagaaagagtgcaaggtctgcttgagacgtgaaggacccggaggagagtcttgttcgctttcgatgtttttagttggagtcgaatatacagttgtttttggttgcgactttgctagatctctctctatatactgcgactgatatatcccgtgtacttttgaagtgatgcgtatattgacatctggaataacaatgcctttcagtttcattatctcaataatggcccttcctgtg

SEQ ID NO: 5710 - DNA, 369 bp, Zea mays
agggtggagtataccatgagttgtcatggcaaccaatgagtgacctgaacatccaagcagattctgcatcaacctaaaaactcagcaggaactactttaggtttgttcatttcaaattccttggaaccacttggcttggtctggagtgcagataattgattgactcctgtttcttgcttatgctaaaagccatgcgagaattagttcagtatcaactcctatatatggctcaagcatagaatgatttcacgatctggttactccaaacatccaaggacacaacttctcaccatgtttcatgtgcagaacttcccctgttaagcttagttgaagaagtatgttgaagtcagaacttccctcacgtcaaag

SEQ ID NO: 5711 - DNA, 361 bp, Zea mays
  misc_feature (351)..(355): n is a, c, g, or t
ccaacgtcgcagccatttatctcgtcgacgtccctgatgcagccattgacaacgattccagcccacccattgttctgcatcagctgggcaaggttgccacccaaaactgcacaacgcatgctcccgccggcatcaaccaccaggaccctgccgtgacctttctcctcaaggaactcgcggagcagaacgttatcctcaaagatcttcagtgtcacaacagggccagcaaaaatctgccggcctccatagattcggaagataggttggagagaacgaagatcaccattcataattaaagcagcattagcatcacatgcttctgcggtggccaatggcaaggcagccatcttnnnnnttcagt

SEQ ID NO: 5712 - DNA, 385 bp, Zea mays
tatatcactgaaatccattttcatccataacagttaagaactagacatgaattgcagcagtatgtatagcaccaaaatacatgtgacactggcagggaaacagatagtgcacagcatgattgctacatggattcggttcagaggaatatatgcagtgacacagggggtttggtttcgtcccttaaacaagatacaactgaatggtcggcgttttcatcaggtctaaaagcatctctcaggaaaccactgaccctggtacagtatatatagattgtttaaccacatgtatatcctgctataagattgatgtgcagcagaacaggacgtattgggagattgcagaatttggatctttatacttgtgcgttgtatttaatctgttccc

SEQ ID NO: 5713 - DNA, 490 bp, Zea mays
ttctcagttgctcgccgtggtcggctgctgctccctaatcgcctcagccgcgacctcaccgtcattcttcagctcgctgcgcgccctgctccactgtgtcgatctgcccatctccttgagtccgtgcgcgcgcagcttcctcaagtcgtcgtgtgcccagcttgctccagctcgccggtcgagcttctcccttgcgctcggattcggccgttaatgcccagtcatatgttctttttcctagctcggatctcgtcatccgccgttctctaacccgtgtgtcggtcggcgtcgtggagttttggtttgattgactcgtctttgacctcgccggtgtcgtcgaaccgtcgaaccccgaatcctgaatgttatgcagaaataagcgaggtccctgtgcatcgcttatcaagtgctcggtcgaagacttcaatcgaaggtcgtcgtcgttcgtgcatccccaagaaatcccaagaatcgggtgaagacgaagtta

SEQ ID NO: 5714 - DNA, 367 bp, Zea mays
gctgctcactgatgtgatcagcaattccgcatggaatggccctgttccaagtaaaccatctcaaggagctcaatgtcaccgctgatcaccgacagacatcgccatggttgaagcgccgtgaatcaatcaacaatcagtatgcttggggatgagtcctagctagaaccctgtccctttcctgctccttccccccctttctctagcttattttcgccttgcttttaaaaaaaaaggaacttccttgaatgcgaagttaggtatagtaattatgaggtttccataagggaggggaggagagaggagacgatagggacttcgtacggggtcgttcgcttgtgggttcttcttccctcctggcttcattagg

SEQ ID NO: 5715 - DNA, 396 bp, Zea mays
gatggtttaaagaaatcaggaaggctacatttccttacacagaaaggagctccatcagtttgtattatttcggtaggaagagatcaggaaactagtacaggggcaacatggctggcacattatgcagaagccgccaacagctccctttcagctcgctcgcggatcctccgctccaactctggcctgaagtgcctgataagcccctgcacaggccatgccgcagcatccccaagcgcacagatagtatgcccttcgatttgcttcgtgacctcatgaagcatgtcaatttcctccagcttcgcgtcaccaaccttgagcctctccatgatcatccagagccagggtgtgccctctcggcaaggcgtgcactgcccacaactctcatgcttgtagaag

SEQ ID NO: 5716 - DNA, 435 bp, Zea mays
ttgccattaattgcacctattatgcatttctatatatgtcactcaatttagtgttccagctatgtctaattcgtccaatgcctcagaaacatctactgatgctgattcactttgggtgttgtctaattcgtccaatgcctcagaaacatctactgatgctgattcactttgggtgttgtctaattcgtccaatgcctcagaaacatctactgatgctgattcactttgggtgtgtccatgtgtgtcctttagcttatccagagcatccttcgcagcacggttctgagctatctccttctttggaccataaatagcacttccaactacctcaccatcaataaccacctgaaccttcaaactcttatcccattcgtctttcagaaatttcacccctcggtgagtcttttggcaaaactcaaaaagctcgcttacagg

SEQ ID NO: 5717 - DNA, 397 bp, Zea mays
  misc_feature (391)..(391): n is a, c, g, or t
ggggcaatggtggcctatggctctggtaagttttgagtggatgaacgctaatgcagcagaagattggaaacattaactggctatttcttgtgtggccacataatcaggacttctaatcacatatgttgcgctgaacctgatggatgggcatggacaacctgcccttttgtacatcgtgcccttcactcttggtaatgatgtgtgttttgagactcgtctcgtccgtacactgcctgatgtgtgctttgttttgttggtacaggcaccttgatcgcgcttggatggaagagaggggagctgcagaacctgtgggcgaggggagagccagagagagtgtgcacgcatatgcatatgccgctgctgccgacgaccccaaactaaccacaggggncagtag

SEQ ID NO: 5718 - DNA, 395 bp, Zea mays
tgcggattgcagttgatctgagaagcttcagggtgatggttgatgcctactgtgctgctgggagatttgaagatgcagttgcaatgttcagaagaatgggggaatggaagctggtgcctgatgtggcatcctataataatttgattcggcacctgcagattaaccagctgatagataaggcggaggtgctctacaatgagatgtgtgagagtggtgttggtgcggataaggagacatatttactgctcatggaagcatgcttcagtgttgatcgcatcgatgatggtatctcttactttgacaaaatggacgaattggagctgaagcctgatgcaactgcatatcataaacttattgatggcctggtgggtttcagtatggtcgacaaggctcag

SEQ ID NO: 5719 - DNA, 367 bp, Zea mays
tgctattgcaatactccactcagtctcagtggaaacaaagaatgcaggacagagtagtgcgcttattgttcctacaacaagagggccagcaaaatcaagatgtgcttcaggattaggttctattgctggattgcagccaattaattttattaccttagcaaccccacaccttggggttagagggagaaatcaggtgcatcaccaaaatgtttcggattacgtttgcaaaatatactgcacattatccagcaaaggctcgattcctgggaaaacgaactctctatttgttattttgttcattcatgtcgattttgaagttgcatggtatgatttttacaagcttggattatatcattgctgaagtggt

SEQ ID NO: 5720 - DNA, 371 bp, Zea mays
ttcatctactgacagttaaggctcttgtgtatgtcttaataaagacaccctttccggtcactccgaggctgcaggctgctctttctccgcctccgaggggccattggcggtggtttcttggctctcagcaggctgcttggcgccgtttgctggggctgccgcgccgccttctttggcgccgtcctttccaccacctttggcgctgccatcctttgtgccctctttagcagcaggtgctggtggtggaggctgcaacatatgtggcggcggagcatgcttcagcttcaccaagatatggcgcatccgggagaggtcggtgggcttgccaggcttggggccctggacaactgtgatggatggcttcttgtcct

SEQ ID NO: 5721 - DNA, 362 bp, Zea mays
ttctattacttgtcttacaaacacctccaccttttcttatctatttgactgtttgtaattattcactatttaataaagtaattaaataggcagtttttaacttaaagcatacagatttacccagaaaaagtttaggtaaaaaaaggtgaacagtaaaagagaattagtcatcataaagaagttacatttacccctgttggcatttggattgcagttcattttctatttcttaaattggacaacaggagatcatgtatctataacaaaatataaagagccattagtttaatgtccaatgtaacctagagggggaagttgttgttgtcttttgaattgagtcgggatcagaacttcagaaatct

SEQ ID NO: 5722 - DNA, 974 bp, Zea mays
  misc_feature (963)..(963): n is a, c, g, or t
  misc_feature (970)..(971): n is a, c, g, or t
agtatctgaggacagagtgactcatgcagcaacggcatttctcttggtggcgatatacgggttggtctcgagcagattctccagggatttcgcctttctgcttcgcacccggccagcctccttcaatagctccccaagcctccgcttctcgtcgtcaacgtctgggtttgccgtacctagcttctcctcgcgcattccaaccacatattccaagatctcgatggcctcatccagcctggtaaacaaaatgcaaatatcaacagataatttgtggctaaaatgaaacacaaacttttaattttgaatagcaagctcccaaacaagtactaaagcagtaactcaggaagaagtaccgctgcttcagcgatctgatctagccagctaaggtagtgttgacatttttgatccagccagttgtactctttcacccagactataaagctaaaagtccacatgccttacaaagcaggatgaagtttccacgagaacagggagcaagaaaacaaacataaaaaagacaaagcaaaaggataaagtatgcggaacccttcttttacagagcagccagcgacaagcaagtaaagatgatgcaggatggtcctacttcaattaaattgatccaactttatactggtaccggtatctgatcaactaattggagtagcaagaagctggtgatagatgctaatcatgagcctagctgtaagaggagtagactaagaacaaagaatccccacttgccatagtacctttaccctacatgccacctactgtttccagcaaatcactgattggaatgcaaatcattatgcatgcagccacacagacagtcatcagcacctagttgagacaatgaattgggttcgagaagtagggtgggagtttaccttcccatcgcgtcataagttccagcaagattactgtagactcctaaagtatccggatggtatggcccgtattctngtccagnngac

SEQ ID NO: 5723 - DNA, 771 bp, Zea mays
  misc_feature (705)..(705): n is a, c, g, or t
  misc_feature (707)..(707): n is a, c, g, or t
agtactactgcactgtcattgatgcccctggacatcgcgacttcatcaagaacatgatcacgggtacctcccaggctgactgtgctgtcctgatcattgactccaccactggtggttttgaggccggtatctctaaggatggccagacccgtgagcatgctctccttgctttcacccttggggtcaagcagatgatttgctgctgcaacaaggtatgctatcaggaataactgtttcactcttcattaattaagactctagcatattagtatgtgagacgtatatagagtttgatgctaatataataggttttgagttgtataaagagtttgccaagtaaaatagtcgctagagctttcattaaccttctgtttcttccatttttagtagctaattaactttataaccttcattactttgctactctggtctgtatctgaaagattttatctatttttcatataagtctcacattcaattgttctggtccaagcttataccatgctctttctctagagaatcaagttaatgttaatcagtgttttaaaggtgtcgcctatgtgtcgccatgcccgccttactcgcctaggtgccgcctaggcgtccaggcggcggtccaacgccttgtctcaccttaccgctttaagaaccatgatgttaatgttattttacgttggtgttgtatttttagatggatgcgaccantnccaagtattccaaggcccgttacgatgagattgtgaaaggagtttcatcctacctcaagaaggt

SEQ ID NO: 5724 - DNA, 971 bp, Zea mays
  misc_feature (909)..(911): n is a, c, g, or t
  misc_feature (913)..(914): n is a, c, g, or t
  misc_feature (965)..(967): n is a, c, g, or t
gcactggcaacccagctggcattgctacaggtgcgaacgcttcttctctgatggcgttgtcatgtaaacttccattttttgatcttgctcacatgagataggcattctgtagttaatgttaatttcttattgctatagttagttaatcgttcctctttcctatctgctaacacgagcagagagacacggctgggctgactgttgagaacggcgacctgaagatacgtctggagagcacagagcagcagatccacctacaagacggtaagcaaagctaaaaaatcacactagtttcctcacccatcctgccaaatcgcccgatttttttttccaatttgacctttttttagaaaaaaaatcgtgtttgtctttggactttggacgaagtactccagtttttagaccctcttgctcggcttcataaaatatgacatcgaggtaaaactgtttgacgccagagaccatggcgccgagaactcggctacgccagcgaagtccttaggctccagcgagaatgagaccttgcgtcatggcatgtgtcgctaaacatgtgtcgctgaccagtgttatctcggcgtcaaaaaaaagtaaaaaaacgctattaagttcttcagtggttaagcgtgattttttttcgaaaaaaactaaaattcaaaaaaggccaaatcgcagcaaaacttggattttgttctgggcaaacaagtgagcgaacagccaaaccgcaatcctgttgcagcactgaacggggccctgaaatcggagatgcagcggctgaagatggcgacagggcaggcgggcaaccagatgatgaacttcgccgaaccgccgcacacgttcggcggtgcgaaccagcaggtcttccaccacccgggccaagcagtgccgccattcgtggtggcgatgcaacannngnngcagttgctgctgccgcacatgaaccagccgttgcaccctctgcagagccnnncagc

SEQ ID NO: 5725 - DNA, 932 bp, Zea mays
gtatcctataaaggaagcgagattgtgctgaactgctgatcattagtaaaaatggaagcgatgtgtttatttatgttctttattttggattttgaggttggaggggagggtgtgtgtgaacgcaagcatgtgatgttatatattcttttggtggaattcctgaactgacgtttttttattactgctgtccagattcagggaatataagtaaaatgaggccagttttttgtgggaaccttgactatgatgttcgcatctcagaggttgagcgcctttttgggaagtatggaagggtggaacgagtggatctaaagacaggttagtctgttactctgttcattgttatgtcctcgaatttaattgtgatctataatagcaaaacaattgttgctcctgcagctatatgtagtttttggtcaaaggcagtcctctatttcattaagtgaattacatccagtgtcagcaactgcagctttgaatcattttctctctccaatttagatactgaagcattactgaatgtatatatatccatccataagacaatgctgctggatttgcattttttttacaaaattttcaattatttagccatccaaaaacatagcaatgcctttgtttaaattttgttttttatcaattgatctgcaatatttgttaaatcacaaatacacgattttcacatgactcctctaagaatgtgatctttgtacggaaactgctatcaccatgatgtggcagagattgtctatcttcacccatgcctggtgcaaagaagctgcaaaaggaccaagttgttacttcatccgttgtgaagccagaggagtttcagcaaaatcagattatgtttatgttttactgttataagtcattggacaagtgtatatcaggataaattagaagaaaaaagttctttcttcaaatttaggtcc

SEQ ID NO: 5726 - DNA, 993 bp, Zea mays
  misc_feature (288)..(290): n is a, c, g, or t
  misc_feature (988)..(988): n is a, c, g, or t
catctcctcctttctcaagcacttgcagccacacatcaaaccctagccgcccccccatctcctcctcccatggtgccattcgttgccgctcggatctccgtcgcgtggtgcaaatcttcaacggttttcggtggagggaggaagggaggaagaaaagggggagaacccaaggtggtggacttccggatcgtacttagggatttgcccgaacttccggtaaaggcaagtaaatacagtggtggttgctaccgtttggtttgcatcctattccctgttattctccatctnnntcctttctcaagcacttgcagccacacatcaaaccctagccgccccccccccatctcctcctcccatggtgccattcgttgccgctcggatctccgtcgcgtggtgcaaatcttcaacggttttcggtggagagaggaagggaggaagaaaagggggagaacccaaggtggtggacttccggatcgtacttagggatttgcccgaacttccggtaaaggcaagtaaatacagtggtggttgctaccgtttggtttgcatcctattccctgttattgagtatgcataagttttaattatgttaatcattgaattctatgatgaagtttatttgtttggaagtattaattctcaattgtctaatattgtggatgatcataatttggtaatgatatatgtggttgattcccatcttggatgaagttgaagtatctttttgaatcatgttatatgaagtgttgtaggcatgacatgcgcatcgcatcatccatcttgcattttgaagttatgtcatgatcttatggtccgaccgtaccggtacatttttagcatcgtacgttgcccgaggaggggtacgatgcggcttcatatccttagtggtatgaaggcagaagtcatccttgcatttgcagacatttgcactcatgaggaatatatgaagtgtgacattactatgttactattgtggtttctacctgtnggggg

SEQ ID NO: 5727 - DNA, 412 bp, Zea mays
ctttcacagcaacgaacatcctggttcttggagatgttcggtggatcaaattcgagtagtagtttgtttgatgcagtggcagattaatgtctctacaggccaattagaatgcacatacagaacagaaccgtccaaagaaagcctgtagagtgaaggctagtactctcttattcttaacagtgtttaacgcagatacatacatacaggcagctagctagatgctagggtttgattggtaaccctgcactccggtctcaagacggaggagggcaacgagggagtgccgtccgccgtcgtgctcgtgtcgtgttgcttggttcgtggctttgtgtgcagtgtgcatatatagaacatgacgtcaccgcgacgtaagcgtgtgctcacatgagaagtcctaccactaccgaccatg

SEQ ID NO: 5728 - DNA, 395 bp, Zea mays
ttcttgtggtggcaagatcgttgtgggttccagaagaaccctcaaatgcggatgacataagaggtgcttgcatcgaggagtgcaccaaagaaaataaggctcctggcgacaagaagacatgcgaagtgttgtgcaccaagctcacaaaaaagcctagcgaagaaggcaaacatgattgatgaagtagcactccgataatatataccctagtggatcagtggtcatctttgtagccatgtctgccacacgatggccttgattatattgtcttattgttttgtttttggtttccactagtatcctaattccttgttcatgtaacctaatgtcactcaaagcattttatatgcttcacttaattaaataaatacaaaggcaaaggcatgttctgtagt

SEQ ID NO: 5729 - DNA, 488 bp, Zea mays
aggcagacacaagcacgcgacgtgctccgctccccagtccccagtccccacacacggcaagctacgcaggctcgtgctcgtcccgcgcccccgcgaaagaactgatgagctgcccgggccaggccggcgggtggctgctcgactacggcctggtgggggaggagatccagggctcggagttcatctacatggtcgacgacccggccgtctccaggtgagggagctgcctctttctcctgccttttttttatgctggcattgactattgcctattggtggctaactgttgatcgattggttgtttggttcggtttgcgcttgcagcgtgaatgcgtgatactggggttcgatgctcccaggaaggagtccggcgccaacaagaggcaatacttcccttcttccttcatttgggctgaattctgcctgcataggagcctgcggagagacatacataatcatgaacggcttgggataatttcttgtttgtc

SEQ ID NO: 5730 - DNA, 390 bp, Zea mays
ggggttccaggtttagtctgttactcctagcctctcaagttaagcagtctactattagtcttgtactgttcttcccgtgccatttgagaaagtaggctattgttggcctcttaaagtgggtaagtattagtgacaaactttgaaggtagagatcgacatagttgttgctatttctgcgttgagctacacatagtcacgcaatgtcataaatgcttgtttctatttgagttcaaggtttgtggttgagagagtattgcatggggggatggccgcatgggactttggtggtatgcatgcatttatctaaatagaaaactgggttgaaccagaacaaagggtaatgtattaaataagcacattggcatgcaatcataagttcatcacctatgt

SEQ ID NO: 5731 - DNA, 753 bp, Zea mays
aagggtggatcacttcagtttctcatcgcttgctctggtaatggcagtccataacgatgtttctttctctgatcatgacagtttatgtttctgcttgtgtaatgtgtatagaatttgtcttatccgtttgcttagtagagataaaatcataaaatggtgatcaactggaattttatctggtcgagaatttgcagtactgtgatgattcatgagatcgccacacagtcttgtgaatgctatgcaagaaacttccacaatttgtcaatgatatcatttgttcttgttgctgaaaattcgtccattttacttattgactgttagcattaagttagcaactataagtttcatccttcccgggatcagaattcagactctgactactcgagtgcccttacttaccatgccatgtctctggttctgcagtttttcctggcactctcatgcttcatcgccattggtgttaatctgagccaattcatctgtattgggcgcttctctgctgtatccttccaagtcttaggccacatgaagaccgtacttgttctgtcccttgggttcctactctttggcaaggagggcctgaatcttcaggtagtccttgggatggttctggccgttcttggaatgatatggtacgggaacgcatctgccaaaccaggcggcaaagagcggcgcagcgtcctaccgctgaggtctgcaagtctcaagggaagttcggaagaaaagggcggtgccgagaaatagtcttgctct

SEQ ID NO: 5732 - DNA, 390 bp, Zea mays
agatgctgcatccgaggccgcagcgaggagtgcccggcttgccgctgcaaagaagaaagagaagagccactacaaccagcagcctgtgcggtgaactcccctgatctgaggccgcagcgaggagtgcccggcttgccgctgcaaagaagaaagagaagagccactacaaccagcagcctgtgcggtgaactcccctgatctggtgtctctagaaaccttttgagctctgatgtcccctgttcgttttggacctgcaataaaacttttgagactgttttttgacatggtggaggtgccgtctgatgctcgttttgggaattaaattacatataggtacataggggttgtcttgtcgctggattctgtttggtgtaatgagctatgaactgt

SEQ ID NO: 5733 - DNA, 371 bp, Zea mays
tgactgcttcgcgtgacgggaatgacggcccagagaaaagacggccacctctcggtctacctgagcccctcaggacccgtgccccgctacagacaggactgcagccactggtgtcttcctggagtccccgatgcctggaacgagcttctctacgccctcgtcatgaggaggcataagaagatggccggcactaggacaccggacgctgaagagggagatgtcttcagcagtggatcatcatcgtgacaaaacgagcttcgtagccatccatccatcctggctaggcgatgacagctgctgtttcacataggatgccggaatggcgagacacgtttatggaccatgggtgctgtttgcaagaagctgagcta

SEQ ID NO: 5734 - DNA, 395 bp, Zea mays
tgctagcacttccttaaccatcttggagagaagccatcactttactatgtcagatctggatcatcatcatcgcgaactgcaagtgtcccaagatgaggtcctgcggcttagacagttggtgtcaagcaaggactccatcgtcaaagatctgcatgcctccaagaaatcagtcgcccaggagctagaggccgctcgactggctaccaaagttgcagaggacaactgtgccattctgaaagctcagcgcgacaaggctatggataaagccgttcttgcggggcggatcttgatgagaaggcatggtgtagttgttcctgatgacattgttgccgacgtcaaggctgcgcctgatgcctcgagtcgcccttcttcttccattgcctctgagaaagaca

SEQ ID NO: 5735 - DNA, 382 bp, Zea mays
ctcgcatcaacggcctcgacggcgtcggcgagggcaacaacctctaccccggcggccagtacttcgacccgctgggcctcgccgacgaccccgtcaccttcgccgagctcaaggtcaaggagatcaagaacggccgcctcgccatgttctccatgttcggcttcttcgtccaggccatcgtcaccggcaaggggcccctcgagaacctgctcgaccacctcgacgaccccgtcgccaacaacgcctgggtctacgccaccaagttcgcaccagggtcttaagctagctaccgggccgcggcgtgccaggacattgtgttgtacactactcgtttctgtcgtgatctgtaccatgaacgaatgcaaatattcttgtgctctcc

SEQ ID NO: 5736 - DNA, 435 bp, Zea mays
acatgaaactaaatctttgtaccaccctacaactcaataacaatcttgtgaaccctctccttgggcatcgcatccagctgcagaatcagcagccctgaggaagaatcatacttgagctcaatctgagctgaaccgagcgtggacttccttggcctgaccgaagagtaggcaccgaaccttccacagcccttcacctccatgcacgccaatgcgacagcctcggagcccaaggtggaaccgtcgccgccgaggaggtgataggtcaggccttccaccgccccgccgctattgaacatgtccaccagcccgatcggggcgaacctgaaaccaggcgccaactcctgcagggaacataagcacgtacagtttcgcagcatttgttgctaaactaaacgggcaccgagtgactgaccttgatgggtgacacggtgagga

SEQ ID NO: 5737 - DNA, 391 bp, Zea mays
ctgggtttcattccatttggcagagaaagaccctgctgatgttcttgacccaaaagtaagcaatgatgcatcggatcacaatcacatgatgaaggcgttgcatattgctattctttgtaccactcagcttccatctgaacgaccgacgatgagagagatcgtgaaaatgctcaccgacattgatcctagctccacagctaggagggcaaagaacaagactgataagtaacagcgacaggctttgtcttagtaagatatactagtaataaccataatgtcagggcctcttggcaccctgtagcaatcatgggggaagcttattaggccgtcagaatggctgattagttaatagaaactagagggctggtaaaataatatggaggtatagcct

SEQ ID NO: 5738 - DNA, 319 bp, Zea mays
caggaacgcgtgtacacatggagaacaagggggaatctgattcccaggttggagaggcgaaatcaacttttgttttagctaaaaaccgattgattgcaaagtctggtggcaaaatagcctgcatagtattgactacacaggctacgcggtctcaccaaatctgaaaaatgatgattgaacctttgactctacaaaaaaaaatgcagaacaatctcaaatcctatcaaccaatcacctactgtatctttgaaccctatgtatgtttcgctatcaacccccgttgctatgttcccaacttattacaatttcattcaagcga

SEQ ID NO: 5739 - DNA, 695 bp, Zea mays
gacaaggaccgccagcttattcaggatcgtataaaggagctccgggaactcgtacctaatggggcaaaggtatcctcttcttctacttgtgcatttcaaatgtgtgttaggaatttaggattatttaaggttcaatggcacttgtttgaaacttcatatgcttgtgcaatgactgttaagcctcataacattttttgtcaacagtgtagcattgatgccttgttggagaagaccattaagcacatggttttcttgcaaagtgtgacaaagcatgcagataacctcaaggactcaaatgaatctaaggtgtccacatacttattaattttgccatttaatttgcagcctttttgagaaggcaatagttactaacctcatgcagtatggataaactccaaacagattcttggtggtgagaatggtccattaaaagactacttcgaaggtggtgcgacttgggcctttgatgttggtagtcaatctatgacgtgtccaatcattgttgaggatcttgatcggcctcgtcagatgcttgtggaggtaaatgattctgttattgcttgtcctttcaactcattattgtcaatgtatgcatattgctaatggtgttgcctgtatagatgctttgtgaggatagaggtatcttcttggagatagctgactttattaaaggactcggattaaccatcttaagg

SEQ ID NO: 5740 - DNA, 439 bp, Zea mays
ctgtcgtcgtaatctgggctcgctgaacaaagtcgtcgcctattgtatcggatgcatggatgcatggatgcaggcactgagcaacgaccggtacaagagcgtgctccaccgcgtgatcgtcaacagcgagagcgagcggatctcggtgccgacgttctactgcccgtccccggacgcggtgatcgcgccggccgacgcgctggtggacgacggccaccctctggcctaccgccccttcacttaccaggagtactacgacgcgttctggaacatgggcctccagtcggccagctgcctcgaccggtttaggcccggaggatcgttggagtgagtgaactacgccggccacgacagggaaaaaaaaatgaaagacctttttgtattcttgagcatctgccaataactggatctttgaaatcctcctctggactggagtctt

SEQ ID NO: 5741 - DNA, 365 bp, Zea mays
tggtgtagtagggtaatgagagaagctacttttcaagatagcaatgggagaccatgatgaatccaggccatatttatattttttcttgaatccaccagttacgttacgtgggaatgtcttgagttcactggttgcattacatctggaattttgctgccctcggatgacccagccacctttgcattgggctccgaggatgttgccactcagcttccccatgttttggtttactttgagttctagcagcgatgggagtggcctttgttattgcagtgtcttggtggctgtgtaaagtatgcgttagctctagctgtctcaggtttaatttgtccccattgaagtagttgtgcctttgtcgatgattg

SEQ ID NO: 5742 - DNA, 471 bp, Zea mays
cttcttcctcaggaactcctgagccttctgaaggtcgccgtcagactcggccagagctttcttgcagtccatcatgccagcgccggtttcgtctcggagttgcttcaccaacgaggctgaaactgcaacagccggcttcctggaaacatgtgtgccaaatgtgagtggtgttgtcactaagaggagtataacagtatagttcagttattagaaatgcttaaacacgtaaacacagcatgaggagggagattacttctccgcggattctgttgtttcagcaggcttgtcatccttgggaggagcagatggtggcggcttcgctgctgtctgggctgcaacttcagcagcaaaatcctggcttttcttctccagcccttcacctaggttgtaccgggcaaatctcctgaccttcatattctctccagttgtagctatagtttgcttcagccactcacttattgtgaccttgac

SEQ ID NO: 5743 - DNA, 411 bp, Zea mays
tactctgcatcagtacatgtgtcaacccgcgccccgcttcggcgggaaaagaagggttcaagttggccgcccactaactttcgccaaatgcatctgcaaccttcatgtcttgttggaggtgagatgaggttctattatcgcatgacatgctcacagattcctgtgcatggcatgcctatgatatgtggcccatcatttcctcccctgtatccatcccatgcatcaaagtttggtcagatggccacgtgggacaaaaggcgcagtttcttgctgctgctccagtaagaaagagcgggctcgaatcgcgttgtcacaggattatttttgtatcgatcagggtggccaagtccatttatgtcagacatatcctccctgctgctgctggtagcgtgtgaatttcctagcattctt

SEQ ID NO: 5744 - DNA, 545 bp, Zea mays
ggttaatcaggctcagaagcagcgacgcaggacataccgtgctcatggacgcatcaaccgtaagtctatctaactaaagttgaagttttgctatgcgatgaactgttcttcatttggagcttaacattctgtttgcctacctggtccagcttacatgtcctccccatgccacatagagctcatcttgtcggagaaggaagaaccagtgaagaaagaggtatgtggacatgtggttgtgtacactgttgcacttgattacctgattcagtgcatgggattaatgttgtgctattgtggtcaatcgtttccttttcaggccgagtctcagatcgcaaccaggaaggcttagagaaggggctctatcttctgtgattggcttagtacaagttttggctgattatttgttgtctcatactgtttacctgagtattgtttgcaagtgctttatcactgtccgaactgtgcatgcaattcactggtctagagtattgttcgtggattgtttcatatttgtgcgtatggctcatgtctgttgctttgcttta

SEQ ID NO: 5745 - DNA, 721 bp, Zea mays
gggcgtgggatcagcctcgcagtactaacaaatttcggctcgaacgctctggtgacatttgcgttttcacccttgaaggtattgcttctcatggttgctacctcatgttcagtttcatgatcctaagatagtaaattacattaaaaaaagtaataataaacgtgccatatccagcagatgtgcccgacaaatgcttctccactaaatagccccgtttttatccttgggcatagagaaaactcttgtatggtcagaattcagcctcctgttaggtctaaactctagactagtttgctttgactatctattcaaaataatggtattaaacctttctctctgttttttacgcaaatgtgggaaaaagctatattcttgtggttttgttttgtcgacacaaatgtggataattctctttgtgccacaggagctcctcgggccagccaatatatttttcctgttcggcgtcatagcagtgctctccctcgtgtttgtgatcctcgtcgttccagagaccaaaggactgagcctggaggagatcgagtcgaagatcctgaagtaattaaaaaccgttcgtgggatcacaagccccatttggagatattgtaagtagcgatgccattttcaaaacgggcgctcgctcactcgtaggatcggagccaaagctttcagacatgggagtacatatgcaaagggcacgtctcggtgtaaagcttggacatct

SEQ ID NO: 5746 - DNA, 1355 bp, Zea mays
  misc_feature (20)..(20): n is a, c, g, or t
  misc_feature (736)..(737): n is a, c, g, or t
  misc_feature (788)..(791): n is a, c, g, or t
  misc_feature (796)..(886): n is a, c, g, or t
  misc_feature (889)..(897): n is a, c, g, or t
  misc_feature (899)..(906): n is a, c, g, or t
  misc_feature (908)..(911): n is a, c, g, or t
  misc_feature (913)..(936): n is a, c, g, or t
  misc_feature (942)..(948): n is a, c, g, or t
  misc_feature (951)..(956): n is a, c, g, or t
  misc_feature (961)..(970): n is a, c, g, or t
  misc_feature (972)..(976): n is a, c, g, or t
  misc_feature (981)..(981): n is a, c, g, or t
  misc_feature (985)..(1006): n is a, c, g, or t
  misc_feature (1008)..(1022): n is a, c, g, or t
  misc_feature (1024)..(1035): n is a, c, g, or t
  misc_feature (1037)..(1039): n is a, c, g, or t
  misc_feature (1048)..(1060): n is a, c, g, or t
  misc_feature (1063)..(1085): n is a, c, g, or t
  misc_feature (1087)..(1087): n is a, c, g, or t
  misc_feature (1091)..(1102): n is a, c, g, or t
  misc_feature (1106)..(1114): n is a, c, g, or t
  misc_feature (1117)..(1128): n is a, c, g, or t
  misc_feature (1132)..(1142): n is a, c, g, or t
  misc_feature (1144)..(1147): n is a, c, g, or t
  misc_feature (1149)..(1150): n is a, c, g, or t
  misc_feature (1152)..(1170): n is a, c, g, or t
  misc_feature (1172)..(1181): n is a, c, g, or t
  misc_feature (1183)..(1183): n is a, c, g, or t
  misc_feature (1185)..(1185): n is a, c, g, or t
  misc_feature (1187)..(1190): n is a, c, g, or t
  misc_feature (1199)..(1213): n is a, c, g, or t
  misc_feature (1215)..(1225): n is a, c, g, or t
  misc_feature (1227)..(1228): n is a, c, g, or t
  misc_feature (1230)..(1241): n is a, c, g, or t
  misc_feature (1243)..(1249): n is a, c, g, or t
  misc_feature (1253)..(1263): n is a, c, g, or t
  misc_feature (1266)..(1274): n is a, c, g, or t
  misc_feature (1279)..(1295): n is a, c, g, or t
  misc_feature (1297)..(1298): n is a, c, g, or t
  misc_feature (1301)..(1325): n is a, c, g, or t
  misc_feature (1327)..(1342): n is a, c, g, or t
  misc_feature (1344)..(1349): n is a, c, g, or t
cctgctggccgcgtttatgnacttatatttccacagagcgcagtgctttcgcttgcatttgacgacggctgatatgctcgcagaatcagatgctactcgaccagctctttgatctcaaaagcaaggtaataacaatgaggagctccgcttatatatatataccttttgcctgcctttacttctgttccatacatctgcaccaaattaaacaaagaaactttgtagtcatgtaatgccgagctagttttgcaggaacaagagttgcaggatctcaacaaagacctaaggaaaaaggtaactaaaaacgctagatgtatgtatgcccactttgacgtaaacgtactgttccgttactgatttcatgcaagtgctgccagctgcaagaaacaagtccgcagaatgtgatccacgacgtctcctgggaggaaggcgggcacagtgggagtagtgttcttggtccgttccagggactccttcagcaccatggcaatgatccttccctgcagacacggtaagtttttccaggtgacatccatgaagccaatagccacacacaacgactgtgttatctgtacgtacttatgcaacctcaatcgcattgattaatgagtgcgtgtgtgttcgtcctgggcgaacaaaggtaccatcagcaggcctacatggaccagctgaacgaggacatggcggaccctgacgagcacggtcggtctggatggatatgagatgctccgatcanntgcccccccaaataatgtcgatgcatgcatatagtttcctgcggtatgcgnnnnatatnnnnnnnnnnnnnnnnnnnnnnnnnnnnnnnnnnnnnnnnnnnnnnnnnnnnnnnnnnnnnnnnnnnnnnnnnnnnnnnnnnnnnnnnnnnaannnnnnnnnannnnnnnnannnnannnnnnnnnnnnnnnnnnnnnnnnaaaaannnnnnnaannnnnnaaaannnnnnnnnnannnnnaaaanaaannnnnnnnnnnnnnnnnnnnnnannnnnnnnnnnnnnnannnnnnnnnnnnannnataattaannnnnnnnnnnnntannnnnnnnnnnnnnnnnnnnnnnanatannnnnnnnnnnncccnnnnnnnnntcnnnnnnnnnnnnctcnnnnnnnnnnncnnnntnnannnnnnnnnnnnnnnnnnncnnnnnnnnnnananannnntttcctccnnnnnnnnnnnnnnnannnnnnnnnnntnncnnnnnnnnnnnnannnnnnnctcnnnnnnnnnnnccnnnnnnnnntcttnnnnnnnnnnnnnnnnntnntcnnnnnnnnnnnnnnnnnnnnnnnnnannnnnnnnnnnnnnnncnnnnnntccaac

SEQ ID NO: 5747 - DNA, 374 bp, Zea mays
cccctaaatatcggtttggttggctagttggtagctttgttgcctcattgcctgctgcaatcagtgatctgtgccgcctggggtctcggaccatcagatctccagctagcttccttgctacttactcccctacccgctgcaccctcgccatggatccgccgagctccgatatcgtagtcgacactccatacttccgcatctacagtgaccggcgcatcgaccgcttggtcggcaccgataccgtgccggcgggctttgatcccaccaccggcgtcacctccaaagatgtcgttgtagacagcgacgccggcgtctacgttcgcctgtacctcccggacacggctacggggtccgatgattccaagaagctcccg

SEQ ID NO: 5748 - DNA, 354 bp, Zea mays
aactattttgtttctttctaaataaattattgattttacttgtgtattttaaatacatagcaaaatatatgtacctagtaacctagacaagctaatacgtcatatatatgtttcttgcatgcggcatgcatgagcctaataatagtccggtgtttattctgttgtttactgcagaggtcggaaactgtgtgctttcatcgaacgccggctgatcatcaactcgaggaacaaaactacgtcacatctagcttgcttgaggcgacgatatgatgatgctaattaacatatatgtcgatcagtatttctggggtgggaataaattttccatcgttctgcgtggcaaactattatcta

SEQ ID NO: 5749 - DNA, 533 bp, Zea mays
acaagatcttccatgggaagtgggggactattcaccttcgaatacattactagtggatgattccccttacaaagctctgcgtaatcctgtatttgtccaacctcttatgccaagcttttcaaagttcacttatactgaatacgagacaccaactgcttttctctatcttgtgcagccgcatactgccatttttcctcactcctacagttacttaaactggaatgacgattcgctgggtatgtgctcatgattatgatgctttacctataccttactacagcttattcatgctttatgtttcaaattcctcataagcaggtcccaatggagaccttcgtgtgtatctgcagaacctagccgctgcagataatgttcagcattttgttcgtgataatccgtttggtcaacctttcattactgagagcgatccgcattggaacttctatgctcagattgctgatagagggcgtgcacccttgacatgttgtgcttgaactcccaagggtcgtgcttttttctgggagttctgtggt

SEQ ID NO: 5750 - DNA, 893 bp, Zea mays
agctggacggaggccacttttgatggtaaagaaaagatatattctgagttaataatttctctaacaatacaatgatacgcagttctcgtgataataatgaattaggaccacagcgataatatgtgttctacaatatttcaggtatctgcagctggaacatgcctgggttgcctactagttggattgtcattcttagctaaggtctggtgcgatttcgtcctgataataagattaacaacttctcattcgtcagaacagtgtcattttttttcttcatggaacaggaacatcactggggaaaggacctgaacttagtgctggctttggcaggcattctggtacattactctttattgcctattttcctataatttgtctagagagatctcgctccggctctttcgctcgtgcgcgtgcgcacacacacaaactgttgttctgacgatctttatcatttgcacaccagattttcggtggatcattttcactgggtatgggaggaataccctgggttataatgtcagaggtacctttactgccataagtaatggcaaaaggatattaccgttcaaaccaaaaaattaagaacaggcagattgaaagtatgcatgaactgaacatgcagatctttcccataaacatgaaaggagcagcaggaagccttgtaacactcgtcagctggcttggctcgtggatagtctcgtacgccttcaacttcctcctggtgtggaactcctacggtaagccaaggcgcaccaagtggtatagaattctggtcagagtgttgcataccagcatcggcataaacattgactctgcagcaacttctgatgatgatatatatttatgtgtggcttggacggaatgcaggcacattcttcatcttgcaagca

SEQ ID NO: 5751 - DNA, 1043 bp, Zea mays
  misc_feature (28)..(30): n is a, c, g, or t
  misc_feature (1028)..(1028): n is a, c, g, or t
  misc_feature (1032)..(1039): n is a, c, g, or t
tactgagcgcgcctgcagcgttgccttnnngttttatcctcctcaggaccaagaagtaaagtggtgagttgaggtatggaccgtctcaattcttcatacagcatatcattatgataagcagcattgccaacctggcaaggcaagaatttaacaggtaccttaatctgactctattctcttgaaactgaattgaaaaaaaaatcaactctgttaaaggcattttacaaacttacggcaaaacatgcaaactttcgtgtgcgcttgtcaggatcagaacacctgtcaaccacgagctggatcaccttatttgctgcctgtaaccagacaacagcaaagttaatattactggcatacagtttcagtccgcaaagcagtgaaaatatacatatttccttacaagtgggccataaaagtaggagctatggcggcacatgttgccaatggcactacaagcttttgcccttatatcagggtctccatttgataagaagttcttcagaagaacaacaagtccagctttatcaatgggcacataaaagtcctggtagccacaatcaaaatgtatcagtttgtacatccaacaaagttttgacttttgacttcagaatacagtatattgatgcacagagatgaagagaaaagacaaaccttcgacatgcgagcaaggtcagaaataatcatgaggaaatcaagcaaagtctcctttgctataggaccctcgagtaatgctgctactctacttggatctagaagaccttctttatgaagctgcaaagcaagtggcctgtagcctgccattttggccacaatggccaagggcctacctagatcttccatgtcaacatagtcaagacaacgcagcatacatccaggaattccaacctgtacgaggagagagaaatcacagaaatgtccactgataggcaagaaaaggtagagccaactataatcagacctctagtagaacttgaatgtactgaggcatgttttgctctatagttttgagcatttccttatctcagtaccantcgnnnnnnnngggg

SEQ ID NO: 5752 - DNA, 372 bp, Zea mays
atcggcacttgtgggcccctgccttccttagggacactttctcagctgggctctgtactgttagccagcgtgaaagtccaagtacattttttgaggatgcagtcagttcagagaccacattggtgacgttccttgccagctacatgacacttttggataacaaatacaaaatggagcaacaagatgattttgattcattaaatagcagcaggctcctgatatcaaagtaccaaatggaagaacagctatccagattgtacaccttgaatatgtttatgaagttccaggatgagctaaaggcaaccatgcattgtcaagttcagctggatgggtcagcatcttcttttatagttattggtttgactgaagcag

SEQ ID NO: 5753 - DNA, 706 bp, Zea mays
  misc_feature (682)..(685): n is a, c, g, or t
  misc_feature (692)..(694): n is a, c, g, or t
gactaaccatctagtatgcttctaattttccttttatgaatatatgtccatcatttcaccatatgtgcttaagatcttttatcttttgtttaactaggtccaggagagtgctgcttcccaatatgcaagattggaggagctgaagaaacgtttagaatctctaaatcccataagggattctgttaatgtgtcagtaagtgaataaccccaaggccatagatctgatgtttcatctttgaaattatttatttctcactgtcagtatttctgctttagtattaacaggaacgagtcttattgattatatgtttcctgtttgctagtagacattagttcttttgttgttttctgagcagataatgttggttttggtctcaactagtatgtgtatgttccgtattattgtctcaccttttcttgtatcagggtgtttatactgcacagcatgctactctgaattcagtacctcagcaaccaactgcacaaaatcctgcagatgtaactggccgtcagaatattgccacaaagcctgcttctatgcaacagcagcctatacctgcggaggcagaaaagaagagaagaccctcgaattcggcaagagggaggggtggtgtcatgatccttccgaagggaagagagggttctgggtcaggatggacaggtgctgggtttgatgtaaatnnnnaaaaaannnctgtcctcctga

SEQ ID NO: 5754 - DNA, 523 bp, Zea mays
  misc_feature (515)..(517): n is a, c, g, or t
tctccgttgtctgtcccaccagctccccatgatgctgtggcaccaaagcattaacaagaatgaatcaggataagtacagttatcttcctagtatttaatctttggtacacattaccgaaaggatttgtagttcgctctactgcctccttggctatccttttctgtcgtagagcatatgttgctactgcaacaaggccaagaataaggacaacacccccaattgatattccaattattgcagccttgcccatcgagggcttcttattgctgggaactgaaatggacgtttagcaattcaagatacgtcagacaaaggtggtataaaccttgtgaaatgtactgtttgcatacctgtaaagtatgtgttcgctatgaagctgtatggtccaaaattgggtggggctttataagtttggttgaccagaggagaaatgattcttatgacttctgagcgattgaagctcgttccactggccggaaaaatactcactatgaatgttagagggtttccttgnnntgaatt

SEQ ID NO: 5755 - DNA, 375 bp, Zea mays
ccatcgcggttgcctccaccaccagtccacggctgtcaccgccgcactcctccacacagacaccttctagagtctaggttccccaggccccacttgccagggtctatcttatgatcttatcccctcctgttatctctgctttccccctttctctcttccgaaccgtcccattcccgcgctctcggcttctcgcccgcctgcccctccgcctgtcagcgcgccggtcgtctcgcctgcaggagagttcgaactctgctccttccagccaccgtaaccatggcgacgcctccgctctactccgtttccactcaccaccgcgccccaccaccatggccgcctccgaagactgccactagtccgcgaataacctttcaa

SEQ ID NO: 5756 - DNA, 410 bp, Zea mays
gctgatgtatctgcgctagcatcatggtattgtgaagctgagaactttgatcagcctatcattgtcataattgatgatttggagcaatgttctggcgatgtgcttggagagtttgtgatgatgctgagtgagtgggtgtttaaaattccagtcttctttgtaatggggatagcaactacccttgatgctccaaagaagcttctctcgtcagaggctcttcaacgattagagccctgcaaacttaccttggggtctccctcagatagattgaatgcacttgttgaggctgtccttgttaaaccatgcgctggattttgcatcagtcatgaagtcgcactgttcgtcagaaattacttttttaggcatgatgggacaataacttcttttattactgctctcaagcttgcatg

SEQ ID NO: 5757 - DNA, 383 bp, Zea mays
ctagttagcttagcatcccaccacaccacaccaaggtcacgcggcggccggcaagaatggcgacgcaccacctggcccagggccacccgcaggcgtggccgtgggggatggccatgtacaccaacctgcactaccaccaccaccaccaccaccagcagcagcagcagtactacgagagggagcacctgttcgagaagccgctcacgccgagcgacgtgggcaagctaaaccgcctggtgatccccaagcagcacgcggagaggcacttccccctcggcggcggcgccggcggtggcggcgacgggaacgagaagggcctgctgctggaattcgacgacgaaggcggcaggccgtggcggttccgctactcgtactgggtcaac

SEQ ID NO: 5758 - DNA, 404 bp, Zea mays
gccacctggatacggcggcggaggaaacagtcagcccggatacggtggaggatacaagcgccatcaccctggtggcggctacgggtctggacaaggagggcctggatgtggatgtggaggagggtatggaggtggcaatggtagtcctgggtacggcgatgacaatggtggtggcattggcactggtggcggaaatggcaatgctggtgggtacggaggaggaggaggcggcggttatggaggcggctacggcagtggtagtggtacagcaccaggaggcggatatcatggcggtggtggtgcacaacgctacgctgggcaaaactagcaagaacaaccccttatgctagtttatgttaaataaacgatccattgttcatgtgactgagcaatttaagcagtga

SEQ ID NO: 5759 - DNA, 528 bp, Zea mays
  misc_feature (517)..(525): n is a, c, g, or t
atggggagagcctgttggtagatgcaaacggttcaaggtttttctctcgtctatttcacgttcaatgtgttccagaaagagtacattacatgatctgtttattcttttcaccgaaagggggggacttgactacattatcgattcatgattacaggtggattgaagtttgggctgatggtgtacttatcaacagaactaaaatggagaaataaggttcagatctaaatacattttcctgatgtttctaaaacttggctcctcggatggctacgcttcaaagtctcagatattgcaaggcactctggttcggagcctctctactgtacacgaagtcgtcgtatcttcagtcttgaaagtcgtaaataggtgcctgttggaagcactgttgaggtttcgatgccctaatttcaaaggggcagactgcaggcaggcgtttctgtatataccactagactacaagtatgggaggatgcctttgttcatacggctgatggatcaagctgggaacagctataannnnnnnnnttt

SEQ ID NO: 5760 - DNA, 465 bp, Zea mays
gctggaccccaagtcgatccttaatccctacaaggttctgccgcagtctgtactgtagctaaaaggtactctgttatcctgtagttcgaaggagttatttccaaactattataacttctaatcggcttatgtcaaatcacatttctcctgtcaccagcaggttaggaccctgtaagtaaaggagtttgttagggctgcttgatgcttgaatggactgtgagcggaggcaaccgaataattgaggcgaacatgcttatcggcgtgcccaatgtaatgattcagttggtggcgtcgtcaaaccacatcggatgtcatctggagaaagagtcattttactttgtcattcaaacttttaggattagcattgaaattttcaggattcacagtacataatttgaatgctaacaattcaggataccatctgctagcatataagatgtccagtccagaggataaactgctcat

SEQ ID NO: 5761 - DNA, 358 bp, Zea mays
cgcaagtatagttacctataatttgctgctaaaaggtctttgcagaagttcacaaatagatgaagcggaagagttgatttacaccttaagaaatcaagggctgagacctgacgttgtcagctacaatactataatatcagcatgctgcaacaagggcgatactgataaagcattggagcttctccaagaaatgaacaagtatggcatcagacctacactgagaacgtgccatacacttgttagtgcattggctagtgcagggagagttcatgatatggaatgcctatatcagcaaatgttgcacaagaatgttgaaccgagcagtagcatatatggcatcatggttgatgcctatgtg

SEQ ID NO: 5762 - DNA, 390 bp, Zea mays
acaattggttagatcccctgacaagtacagttgcggtcctacccatgtccttgattccagtgatcttcacaaccttgccctctccaacagagacttcctcaacaacatctgcatacccaaacttatccgtgcggaagtgctcaatgttggcaatgggaaggcagtttagggtcttggtgatgaactccatctcatccctctccacgtccttcaccaccagaatctttgccttagcaagatagtgcagagacaagtcagtgactgcatcacgcaagatgctcttctgaatgagcaatacattgcatccagccgccttgatctttttgaccatcccaaggatataattgcgctcctcacgtaggatgcggtccatctgtgcgtagtcggata

SEQ ID NO: 5763 - DNA, 480 bp, Zea mays
ggatcaaggagcgtgttgaagagaaagaaggcattcctcccgtgcagcaaaggtaccatgctgattattattttttgttatatctgcaactgttactatttgttcttcggaatgcttattctacttgaaaccagttatgctttcctgacgtctgatgctgatgaagctattttggtcgcctttgcaggctcatctatgctggtaagcagcttgctgatgacaagaccgcaaaggactacaacatcgagggtggatctgtcctccatcttgtccttgctctgaggggtggttactagtctaaacctgatgaactagcagtcagataaactgttgtgttggctgcgaaatgtgcaggcctgatgttgaacttgcaaggagataataacaaattatcagctttgcgcctgtgcccagtggaaggggctgtcttccaagttattgtctgatatggaattgttccagattatcatgtctcggcgt

SEQ ID NO: 5764 - DNA, 494 bp, Zea mays
ctattctttaccaagcgctattttgttctcctgacagcagcagtcctcgtgatcacttggctcaatctcaggtaaaaatgattttttttttaaaaaaaaatgggaagtcatttttaacgcaatgtcagttcattgaacagaggcttatggtgtggattattagttgaaaacctagaacagagattgtagaagtcaaatcctttgtttgacttgactgcagcaatgatgtttatgactcggatacaggggctgatagggacaagaaagaatctgttgtcagcattactggcaggtgccgtactcttgtttcatagagctagtagcattgtaaatggctggcaactggcatggttggttttagaagtgaaacatgatgctatgttgtgatctggttatgcagccgagcaatgacacaaaatgcggcgaacttttcccttttcctcggctttgcagggctactttgggcctttgcagaagccaaggatatcagatta

SEQ ID NO: 5765 - DNA, 707 bp, Zea mays
ggagcaaagtcttcaagtgtaggaaggcttacaagaaagtaggtattatcgttaatgataagcatccttttccttgaatttctcacctctcatttatcccttttttgttgtttttatgaaaaagggataagggtatgcataaggtcgttttcatgagtggcattttaccagagggcactgatgttggttactatgttggtggaaaggtcattttcttattttctcaaattgctattttcagccagtacaaatgtttttttattgacacttaagtaaatctctagaggttactggatggatatataaaggaacttgggatctactgtcattgctgcagcacagtggtaagttggtagtccctttcaatggaatgtgacacaactcaactgttaagcctgcctagtctaattcagtccgtttaaaatgaataggttagtccttcacagtttgaaggtcatgctggtcgagctgctcgacgcaaaccgtgagtttattctagcttcttttttttgtaaagagtacaattcaagctctaataccttctacaaacactattgtagttaccacaacatatatatgtcaaacggcgtttcactacatgagctgtcaatttcactcttgaaaggtcaaaagatgtcaaacagacaaagtgatgacttgtgcagcatttgttcagatggtgggcaactactcctttgtgatacctg

SEQ ID NO: 5766 - DNA, 367 bp, Zea mays
ttcgtcggaagacatggctgcagaacgtgaaaattaagctggtgattcttggaatccttttgctccttgtgatcatagtctgggtatctgtttgtcaaggctttgactgcaccaagcatgaaacatagtagtaataagaatggtgcagcacgactgtggcagagctgcgatggatgcgagtttgtgctggtgaggtcaagtgtgtacccacatatgctttggctctcaagttcgattccaccagacaagtatcacggtacaaatgtaagtccgagctggtctttgttgcacgccggaggtaggtgtacttgcaatgcaagactagcatgatataaagtgatagcatggttccttctgtactagctga

SEQ ID NO: 5767 - DNA, 509 bp, Zea mays
  misc_feature (117)..(119): n is a, c, g, or t
cagtgaacggcctctagtcttgaatcttgattagagcactctttattcacttactggctctcgtcagtcgtagtagctcgaggcacgttgaaaaggagagagaaaatcagtgaacgnnnctctagtcttgaatcttgattagagcaccgtttattcacttactggctcgcgtcagtcgtagtagctcgaggcacgttgaaaaggagagagaaaagatctgtttcattcttcaatctattccaagctagccataaatagccaattctcttgctgcattgtttcgatgaatttttatctgggagaaattgagagtggttggtagtaaactagtaacaactttacgaagagatgcggccatcgtgccgaattaattgggcggaggtacggtacggataaatagcgggtcgtgtcgtattcgtggatcaaagtctaagcttaaacacggactaattagtttttaaacggtcatgtcgggctattatatcgtatcgtgctaaatctaaggcctg

SEQ ID NO: 5768 - DNA, 359 bp, Zea mays
gcgtcactgatgagtaggacgtgttacattctgttaggttgtgcacatgatgtgtttgtcaatcaaaagctgttgccaggaacaattgccctgttagagtgattcattgtagtgcggttttgcatgcggcaggtatgacaataaattgccggtttctcagagcttagcaatgctgcagaaactgctgaataatcgagtgtaatcggggtccgtgagcaatcacatctttgtcagtctcccttgttttgtttgtctcattgtttgtagtaccttgttcactgagatgatagtgttgattattctttggtccacctgtaaccacttagcgtctggtgtgtttaaggtagtggtcggttccg

SEQ ID NO: 5769 - DNA, 460 bp, Zea mays
caaaatagtgccagcgatgtccaggtaagcaagaatagtacctaagactaccaggaaaaacaggcgaaaccaccaagaacgaagcgctcacccatgattcccacggcggagatgggattgtcgcttcaccccgcagtgatgtcatcatcctgctgcttacggcacggcccaaacaaaatctggtatgggatggtgaccgtagcctgcaacagatatcaagagcattggcgtcaaagaagttgaagaagcaaagtgcacggaagaaatcaaaggtaaagcgaagaggatttctcacctattcctcgcttgctacagcaagcgcgtgctgcggcacccgatggtgtctgcacaaaagggagaagtccagggatggagaaccctcactgtcaggcgccagtcgccaagcccgtcactctttcttttttattgctagttgcaccagcgttctaaatgttaaaca

SEQ ID NO: 5770 - DNA, 398 bp, Zea mays
cgatcttgatggtgtcgttggccttgatgagagggtcggggtagcggatggtgcggtcgccgtaggtgttcaggtaggggatgactttctggccaaactgaacagacctcaccttgcagagcttgaactgcacacaaaccaatacaaagtgtggttcttgaaagacaattgatccttgaaagacaattgatcgcaacagccatttcatccatcatatcatgccattctcgcttgtgggaaattggaggatgcatgctttatagaatacttggatccactgtacaaattgatacttttctcctatgctcaggggatagatccaattgagcactatgaaaagccatgtcgcgcaaacctgcgccatttcaaaattaagcaaggtagaagcaagcatacga

SEQ ID NO: 5771 - DNA, 335 bp, Zea mays
gggccgcgatacactgcctgaatttgccggcaacaacatcagctgcgccgggtttagtactccaactatcagcggtggaggctccttcgtgttcaagactgaagatcttgacgaacaagaggagcaggagttggcttcacactgcgacgacgttttctccgtgccagtgggaagcgatgctctgcgggcgaccgacaccttcagcctcccaaggggcgggtacggcgagctgcttaggcaggggttcaagttggaatggaatcggacatcggaggatcagtgtggccagtgcgagggatcgggctccggcggacggtgcgcctacagccagaaga

SEQ ID NO: 5772 - DNA, 389 bp, Zea mays
ctctcatcagccgtactacatcgccgtcgctgcttcaaccctgattatcgctgccgccgcgcgcgcggtgcagaggcaaaaactagctacggccggccgcccagagtgcaacgcaacgcgtggcttttgagtcgggtaatcttcatcgtctcccgcccctcacttcgcgcgctcatcttttgctcctgttcatgctgtcatcccgtctgaacttttaaccacgcaatgcaagcaatcaatcaagcctctgcaagctaggatgaggatgatagattggattggataatacacaagtacgcagggagttgttgtgtgattttttttcaggttggggaagaagatcgaccaacatgtaaactaataagctcggttcaattaagcagatggga

SEQ ID NO: 5773 - DNA, 438 bp, Zea mays
gctgagggagacactgcgcaagtggctcgacgacgagtactgcccggagccggccaacgtggacatcagcagcaccgccgcgcggtcgtatcgcgaatccctgatagcgcggcagtctgatctgggagagatcttgctgaggatggtgggcgacctggacaagctgtcgtacagggagagcttccacggccccttctcggccgccaacgctgcagtccgtttgatcgctcagaggatggaggagtcactgcctgatgaatgacggtggtgcgcgacctggagtttctatatggcacgacttttgatgaagtcgtaggctatatgtacttttgatgaagaacaattcgatcaccattcctcaccgaggctgtcgctgacagaaaatggtgagaataggctcgagacttcatttttctgctgaaattcgccaacgtacta

SEQ ID NO: 5774 - DNA, 826 bp, Zea mays
  misc_feature (795)..(796): n is a, c, g, or t
  misc_feature (820)..(820): n is a, c, g, or t
tcttcggcacgcgctgtcgctgtacgaggtacgtacgtacgcctccgttctctactcggacaagtgctgggtggatcgggaagtaccactggagtcacggcctagtctgattagagcctttttttttccgtgcgccttgacacttggggtttatagtaccatcatgatgcttgacggcttggatggacgctgctggtgcaggactgccacgtgcacgcgatcgcgcgggactacggggcgctgacggcgcagaaccggcagagcatgctggaggacacggggttctcgttcgtcaactgccgggtgacggggtccggcgcgctctacctgggccgcgcctggggcaccttctcccgcgtcgtcttcgcctacacccacatggacgacatcatcgtccccaacgggtggttcaactggggcgaccccaaccgcgagctgtacgtcgtccccatctatccatcctctgctgttgcttgcgccattgccttctgatggggctagcggacgccatgccaggcgtgcaaaagcgcacacaaagggagggaacactcaccgcaccggctccattccattccattccacttccggtgaatcatccgtcgtgatcgtggaggggcttttaagattcgattcccgctggcccgccgccaccagcacaggcgcaccgcgcacgggcagcactcacccgtcaaatgccaaaggctaccaaaaaatgaccttctctcgtgttgctgctgcaggacggtgttctacgggcagtacaagtgcacgggcccgggcgcgacctatgccggnncgggtggcgtggtcgcacgagctnaccgac

SEQ ID NO: 5775 - DNA, 712 bp, Zea mays
cggtggggacttgcagatcatctctatggaaggatatggtatgtacatacttaacctttattatattcagatattgagcacactgaagaatgcggctgtattcatctctgtttgattttcataaatcagtatgaagttaattttctgaatgctgattattcctgttttgtaaagtgcaagtgaaggttaaaatatttacacatagaccttgggaagttaagcataaatgccaattcttgcacattattttagcttttctaatttgctatgggaacttataacgcctgaaattcagatttccattagcattaggatccaattgctatattgctgcaccagtttccttgcagaaatacagcatagctacactcttgtcgtttagttgatcactattattattttttctgttttaatgtaggaactgatgcttacctccacctttcacggctgggagattcggaggaacccttgccgtaatttattcaaaagaaccattcctgtaattaggatattgcttctgtgctggtatgcaagtatagttctgaaggccagccacctgttcagctgttggtgtccctacttgttgtctttattgttcattcatcatctcaatggaatgtgatcgtaattcataatcgttttatgactgatttgtactgtcattataattgtcgaacctccaaaaaaaaagttgccgtcgagcatccgaggt

SEQ ID NO: 5776 - DNA, 353 bp, Zea mays
ggcctcgtcatcgtgaaagggctggacgagtggccgaacgagttccagaggctgtacgggaccattgacctgtactggatcgtgagggacgggggcctgatgcttctgctgtctcagctcctgctcgccagagacggcttcgagagctgcaagatccaggtgttctgcatcgcggaagagggcacggaagccgaggagctgaaggctgacgtcaagaagttcctgtatgatctgaggatgcgagctgaggtcatcgttgtgaccatgaagtcgatggaagcgcactctgagatcagccccaacgctaagaaggatccccaggaggagtacgcgagcgcccaggatagaatcag

SEQ ID NO: 5777 - DNA, 801 bp, Zea mays
  misc_feature (748)..(748): n is a, c, g, or t
  misc_feature (750)..(750): n is a, c, g, or t
ctatttgctgatgaagatcaatgcaaaggtttgggacatgattttgtctttcttttgcactgtattgttccctggttcatgattatattatcctatttcctctgtttttaactagcttggtggtctgaactcgttgctgcaagttgaagcatcttcgtcaataccacatgtgtcgcaagtacccaccatcatcttaggtatggatgtttcacatggtcatccaggacaagatagaccttcggttgcagcggtaagatgggtgtacctttacttgtacaattcttctgcccacatggaatctgagtggttttgtaaaatatgtgaaatggatgtctgttaatctgatgtaaaccatacctttcttctttgtttaggtggttagttctcgtcaatggcctcttatctctagatatagagcatcagtgcacacccaatctgccagactagaaatgatgtcctcgttgtttaagccgcggggtactgatgatgatggcctcatccggtaagagatatcttcttagtatgttgatgtatggtaagcgtgatgacttttggatgctaagtttatcttcgtatttgggacttccagggaatcactgatcgacttctacactagctctggaaagcgaaaaccagaacacataattattttcaggtctgaagctttggggttattgttagcttgtatcactaaatcttttttgtagaaacaaattctttttttttgtttttgttttgagaagtatgnanggtacattctttgctgggatggattattgatactttcttagccgccgtggt

SEQ ID NO: 5778 - DNA, 771 bp, Zea mays
gatgggcttatggaaagagttgagattgagatttgctcaaacaccagtgatttagatgctattaaaaaagctataacatcaggtatgagccttttgggtattcttcagtgttttttttaacagtgatgcaatttcttcgtgtgtgctgtaggtttcttccatcactctgcacggttgcagagggatggtacatataagactgtcaagaaccctcagaccgtgcatatccatcctagttcaggattagcggaggcaagttcatttgattgtacatcgtctcttttttcatagcattcataattctacattttcttctgcgagttttagttatgatctcgtgttatgtgcttgtatatatgttgtatgcaggtacgtccgcggtgggtagtgtaccacgaattagttctcacgacgaaagagtttatgcgccaggtatgcccttttttttcctttcagaatctcatcaagacctgcaggagaatttgttatgtattgttttgaaatactgtggcactgcaggtgacggaactgaagcctgaatggctggtagagatagcaccacattattaccaactaaaggatgtggaagactgtaagtcttgattgtgatgccgttaactgcccatcctagtttttgttgtatgagctacacgacttaaataaatgcctctttctttttcctgtacagccggaacaaagaagttaccgaagggccaaggacgagctgcattgtagctatgatacatgaagtttcgatggatgtattgtgtt

SEQ ID NO: 5779 - DNA, 376 bp, Zea mays
attcccaatgagtcccaacaaaagaagcttgatttgggggttttcttgaattattttggctaagctctctcaatctttcttgttgcttatcaaatatactttaacttatataattggctcaactcaaaattttaaacttttcatcccctttttcttattttcttgaattttgctcatggggctcacttagggttcttaattagggttgcacattcttatcttttcaaagactcaattgttttgatcatgacacttttaagtacatacttggtgaattctttattacttaagttaatttgatgctcatgcttactttgatttacataaaatgatggtttttggttgggctttacaagagaaaccctaggtgacgcaa

SEQ ID NO: 5780 - DNA, 969 bp, Zea mays
tgactcgcggtcgattgcgtgcagactctttcagcatttcaatggtcggcgttattagcaccactgcaccaatcaaaattgctcccgcgtactcccggcaagggaacgtaacgccgcttctccgcgtgaatactgcgtactcataccacccatctatccttccaggtgaacgatctcatcggtgccggcaagtcgtaccgcacgctgagcgacatcctcgacaaggacatccagaacgactgcgtgaagaagcagggaagccactcccggaacctgcgcagggtccgtctcggcctcggcctcatcaaggccctcttcgagcaattcctcgccaccgagtacgtctcctttacattgagccaaacgcaaacatctcgtcactgaagtctggacatttcaggccagataggccgtcttgactgaatctcaaggcgtctatctgtcctgtatacagcttctgatgtccttttgtgagatggcaacttctgatgtcgacgaatgcatgatccagaactggttatctttcggataaatatatttaccaaattgccagctagtgctcataagctatttaaagccaaattgccagctagtgctcataagctatttaaaaacacagtgtgactgtcaagtgctatgattgacactttgacaggtagatgttttgttctaaaaagatgtatattgacaggtcgctctgttctctggcacttgatttttttcaggggttcattgtatgatgctgctacgacagcttacgggcaggtgtgcgcgccgtttcatagctgggcgatcaggaaggctgttggcgctggcatgtacacccttccaaccagggagcagttggtagtgcggctgaacgaaactggtaagcaaacatgaacacccaccaccacgtttttaagcattacattacaagtttaccaagcttcgaatcttggtgccccggaagaaaacgccttgatttct

SEQ ID NO: 5781 - DNA, 790 bp, Zea mays
ctgatcctaccaagcaaagttgatccattggtcaatctcatgaaagttgagaaggttcctgattctacttatgatatgattggaggtcttgaccagcaaattaaagagatcaaagaggtttgttttgaactaaaatgcagtatcaccaaaatatgcactttctgatttgtgaactcaactttcaggtcattgagcttccaatcaaacatccggaactatttgagagccttggaattgcacaaccaaaggtttattttctctcttgaggcttgaagaccatcttaaccttttgaactttacatgtaggtggagaagactgagatcttatttattttttcagggtgtcctcctttatggacctccaggcacaggaaagacattgctggcacgtgcggttgctcatcacactgactgcaccttcatcagggtgtctggttctgagttggttcagaagtatattggtgaaggctcccggatggttcgggaactctttgttatggccaggtaggctgagcaaatatctccacatttcttttcctgtcgtacctgaagcattagtggttacttgttaggccttgttcgtttgtgtcggattgcacccggaatagttctacctaatcaaagtttatataaattagagaagcaatccggttaggaatcgttccgacccaccaatccggcagaaacgaacaaggccttagtgagttgaagcataactttgcacatgcacaatctgttattatctttcattgtgggcttagtttgttttatctggttcacttattgcagg

SEQ ID NO: 5782 - DNA, 759 bp, Zea mays
  misc_feature (707)..(707): n is a, c, g, or t
  misc_feature (752)..(754): n is a, c, g, or t
aggtttgcttttgccacacaaaattgatgaaccaaagtcattttagcagacgtctttttttttaaaaaaaaggtagattctaacatcctctttcaacagtgtgaaaagttctcaggaacttgaactggaggagctggagaaggcccccaagttcagggccaagccactaaacaaaaaggtactaacacatgtcatagatgaacatacatttgattagattatgaagttggagcttaagtttggggcctcatgtcatgcagattcttgagagtaagggagacattggagtgtttgtccatcctaagtctcaggtcacagctcccaaagaattccgtttttgtaccgatgttcgcttgggtcctccatcagttgctgacttatttgacaaggtatttatttatcgacagccatacggtggtatagtcactatactgtttttttgtcaagatcttattaagctcttgtcctattttgcagctctctcttcactctgaatgttcttcaaacagtaacaggcaaggtgtgcctagatgcaccataccaaaccctttcagtctacaaacagaggttcgtgagatgtaattcttttttgagtcacagcatttctcataatgtgtgtgcaacagaataattatgcatccctttttgcaggaaagaggtcaattaaaagagaggcagctagaagcacaactcttacaaaagaaggnggaggaggaaaaggccagggttcacaaagctaacccttacccatnnnaccac

SEQ ID NO: 5783 - DNA, 376 bp, Zea mays
ggaacttgcaaagactccactaaagctagcaaaattaatggcaactggattgtcatttgcaaggatgtgtggatgcatgaagagaattctcctgtctcgcacttcagtatttatgtaaacaaaagaaaaggtctggtaggaccctaagacgtcaaaaaatgagagaagttaagacaatggacatggagcaaacaagagctgaaagaaacgtgatgctagatacaaatcctatgtgggcctcgtctccacatggtatgcgccatgcagctttctccaggggtgcagctttgagattattgatcacccaaagacaggaaccagaatggatgtccttttttctgtagcggaggaatagatctgcgctaccaaactccac

SEQ ID NO: 5784 - DNA, 340 bp, Zea mays
gcgggagtagttttcatacggtgagaactctgctatcctctggttggttaccctccttaacatatatggcaagtggctcactgtggggtgatttcctttttttcttcttcttttgaaccttgcctctcgtcgacatctgaccgacattgatcaagattttttttagtacggagtgacgaagagttgatatggagctgacgatcatttgaattgatttcgttgtgcaagacttgtattacataaacatttaaatacatgtagctgaacatttcagtagaaatgctacggttgtggtctcccatcgttgactttcattagcgtggtggtaaacatcggttct

SEQ ID NO: 5785 - DNA, 466 bp, Zea mays
cgcgaggtccaggctgtcgtcgacgcggcgcccctgccactacttcatcaagggaatctgcaagaacgggcagagctgccactactcgcaccaccggcaggaggcccaggtctgctccggcgcgctggagaagctggagctggagatcattgagctgctcaagtcgcggcacgggcagccgctgtccatcgcgtcgctgcccacgctatacggcgacaggtacgggaagagcctaaaggccgatggctacctcacggagagcaagcggcatgggaaggccggctacagcctgagcaggctcatctcccgactcagcaagatcacaaccatagaaaggtaaattaattaattaattatcagaagagagaattaaagagatcattggatttgaacgcatgcaggccgcacgggcagcactatgtggttctggcggaggacgccggcaggtacaaggagttgatgagca

SEQ ID NO: 5786 - DNA, 450 bp, Zea mays
cgctgcgtgctggtggaagagacgccagaacattctccgtgctaaaagattagctgcaggtaagaaatgcaaacaactgtccaatgagaaaagcacgatgtacataggtttgtgctgtgacggatcgattacatttgcccttctcattgcagcaagggaagctccttatgcaaaatcaaggacccagttcacccgcgatgtgcaaatggccaagcatcaacggacacatgaaaatgctcggagcagcaacagtgaaggctcgccacatttgctttcctagctcggtgagaatactgcgacagtgacttggcttccatctattcttcagttcctcctttgtatgctcctctgcagtcttgaaagacgaagctgctgtacatactagctaggtcacgaatggtgtatatacttgtattttttttggtgatctagaactcagtccaggagagg

SEQ ID NO: 5787 - DNA, 637 bp, Zea mays
aggaggcttcacgaaggtgaagcagttgcactgataagtgatgctgggacgccaggtattagtgaccctggcatggaactggtaagttgattcacctaattttaagtctgcaaacctcatcgcgtacatgtgattatttattagagaacatctctggctgctatccttcatatcacgtgaaggggccagcagttgtcatctcatagtcactttaccctgatacaaaacattgttactagtgaacagcaccaacttcttgttttaagtctaatgcttcttctaatttaaacctgtcactctgtcagacattaagcatgttctactgttttttcacaggctagactatgtgcaactgagaaaatccctgtcattcccattcctgggccatctgctgcaattgctgctctttctgcatcgggtttgccatcaaatgaattcacatttggtaaataatgctgatactgtactcattttatttttcagttgtaaggaactattggggtcagtccatattttcaattttagttggttttttaccaaagcatgctcggtcaagaagagataggcttgagatatctgctcgtgaagctgctacacaaatattctatgttcctccccatggcattcagcagtttct

SEQ ID NO: 5788 - DNA, 814 bp, Zea mays
cgcctcctctttgaacatcttaacgcatatgcactttgtattttggtaacaagatggtcgtcatgaattatgtttttcaggcgctgaggaaggagcctttgacagtctatggtgatggcaagcagactaggagctttcaatatgtctcagatttggtgagtccctctatcactattaaaggggcatttgcacaaacctatatgctaaatataggtatacgagagaaactatctatacacttgatatctcaaacatgttaaataccagcatccgtgacaatatctatatgctagctaaatataccccgtgctttattgctctgaggaggggagtgcatatttatgatccaccaaatatccgtctgtcagtcatttcttgccaagacatgtagttattcagaaatcatgcttcgtgatgagtatcagtcgccccctttgttctactacccgattcttttggttctaccggtgtcacctatttttccgcaggtggaagggctgatgaagctcatggaaggggagcacattgggccgttcaacctcggcaaccctggagaattcagcatgctggagctggctaaggtggtccaggacaccatcgacccagaggcgcacatcgagttccgtccgaacaccgcagatgatccgcacaagcgcaagcctgacatcagccgcgcgaaagagctcctcggctgggagcccaaggttcccctccgtgagggccttccccgcatggtcactgacttccgcaaacgtatcttcggggaccaggaagggtccaccgaggcagctggtggcctttcttaagtgctaaa

SEQ ID NO: 5789 - DNA, 1115 bp, Zea mays
  misc_feature (23)..(25): n is a, c, g, or t
  misc_feature (1052)..(1057): n is a, c, g, or t
tgggaatgggagatgtactttcnnnttgttgaaaaagcacaagaagtggtaagtcatttcttgtgaaattattccttttgtcttgtcttttgttaggctataatttgatattctgtggcattacctgtttgtacaagtagatgcgccaagaagatgctgatgaattacagaagaagatcttgagtgcaaaattcaactttaatgacttcctgaagcaaacacaaatgattgcaaaaatgggttcattcagtcgtttgattggcatgattccgggcatgaacaaggtacaaatatgaacttctggatcacatttaatatcgtactttggagttatgtcttatgaaagcaattaatgatcatattcaaactataaaattcacattattaagatttaagacaaatattgccatgtttaaataggttacccctgcacaaatccgtgaagctgagaagaatctcaagtttatggaatcaatgatcaatgtgatgactcttggtatgtattccgcagtcaagagacattctgagaattatcttttttgcatgttcctcctgaactcttactgtccagtgtttctttatactgttttaagtcttgtaacacatatctggagcttttatgtgaaacttatttagtattttgattttttgagcccaattgatttgccaagaagtcagtagcttgtctaagctttccttggccagcgctacggaacatgtaatagtgtgaatatatagattagctttcacttgctatcatttgtttggttggtattctactgttctcgtagttgcaagaggggccttaagttgcctcaatctgagagtgctccacttccaaaaatatcaacattttcgttacagttttacaaatatatttgagaaatttattttatgagcctgaactctgaccagagggatgcattcctatcatatcatcatatttaacttcgaggctaaggccactaactaaacagtgtctcagtcaataactaatcctaagttccttgatggcgaaacccatctcccctatctgtatggtcagttgtttnnnnnngcttatgcagaggaaagggaacgaccagagcttcttgctgaatcacgcgagagaagga

SEQ ID NO: 5790 - DNA, 422 bp, Zea mays
ctctagcttcagttacagtcatgacattcatgctagcaggaggcttctttgtaaaggttagcacttagcacgcggaaacgtctgtggcttggaccgctaaaaatatttctgttcttgtgcgttgccctcattctactctgatggtctgcagagcgttccaccattcatctcctggctgcgctacctgtccttcaactaccacacgtacaggctcctgttgaaagtgcagtacgaccccgtgccggacatcctgaccaccacgaggcacatggacagcggtggcaccgaggtggcagctctcgtcgccatggtcatcgggtaccgggtgctggcctacctgtccctgagaagggcgaaggccctgggcagctagcgcatcccttcacgcgcagtggctgaagcctgagctcgtggagctggtt

SEQ ID NO: 5791 - DNA, 390 bp, Zea mays
ctgtaataatcttgagaaggtcaactggagttgcagcagggtccagctcatggcaaccttttggagcattatttctttcctcaccagtgagcaggcaagaaggaacccgatgagagaagcggaaaagctcttccttcggtattcttctgaccacactggagcccgtgagcctgtggaaaactgccctgaaaccagctaccttcaacaatgggacaacagtcacaccttgctcttcagtgaaatcatcgatcacttctactatctcatatttatatatcacatcatctggtgtaagttcattccaatcaggagaccagttccggtacacagcccatgtatcgcctttttggggaataatcctgataattccccgaggacctttactccagc

SEQ ID NO: 5792 - DNA, 510 bp, Zea mays
cggccagtactttgattactggaaatgtgttgacaagaatgtgagtgcttcttgcttatgtatggccatttacaaaaatctattaatcttgttgatgtggccagtacttagtttactgaacagtatcttgttttggttgttgctactatgcaggttgcagaaaaactctttgagatgttaaaatgacaagaaaagttttccctacttcagttatccacccaaagttggtaataattgtatcacttgtgtgacctatagactattaaggcgctcaatatttgttagagaagttttgccacttgggtaacacaaattttccactgccagtttgcatttcatttctgctactagtattgaaccagcaggtttcctcctgcattgttggataaaaaatccatcgaatatttacaagattgtggctgattattaaatgctgtaatacaccttaattgcttttacggtgtattttgaggagcacatagcaaatcatttgggtcctaactttggatg

SEQ ID NO: 5793 - DNA, 1012 bp, Zea mays
ttgttccttcatcacacaactgtgacgtaagttaatttctgtctgttctctgtttagctaaagttattttgatagttcacttcatatgttactgacaagttcaatattttttagattccgcatgtgaaccgtactgagtatcagctgattgatatttctgaggatggatttgtatgtttctctaaacagtaaaactgtaatcttctttagatgaaatgttattcagtcttataatttaatttaatttgtttcaggtgagccttcttacttcagatggcaacactaaggatgatcttagactcccaactgatgagactcttgtggcccaggtctgtatggaaatgctttccatcctaagcgctgctagttttcttgttggcttccgagtattctcgatgatggttttatttgttagcttagtcatatgcgctttctcagtatgttctcttccttaaattttgttaatggattaatggatttggttcttacaattacaagtattgtggaaagtagggccctgtagagctatacagtcccttgcgtttttagtctatctactattccacttgcttgcaaatgatgcaacatgacaaccatgtcgtagaatacatgctgaaagtgcaccaaaagtgcttgcttttaaactgacatgaattcttgttgaaaaatgattttatatacaagtcctgcactctgcatcttgtctgtgctgtgactgagtttctaggacaatgcaattctgatgattgaaagtagtagtgtttgcataacttgtatctgttgtggccgagttaacggatacacctcaaattactgttttttataatgcttctgcattttgtatgctccttaattcagattaaggaagggttcgaaagcgggaaggatcttgttgtgactgtccagtatgcgatgggggaggagcagatctgcgcgttgaaggatgttggccccaagtaacttccttggctttggagacggaaccctactgtatctcaactaaatcgaaaag

SEQ ID NO: 5794 - DNA, 869 bp, Zea mays
cagctgtgcttctccgatgcaggaaggaggatcttcaacttgttgatttagttttggagtctgcaaggaatgagtatgcagataaagcaaaagtatatcctcctgagatagtggtagatcgtcaaatctatctgccatctgctcccagtcattatcaggcacctggcccctcatggtaaggcttgcagttatgtcatggaccatgagccaatatttccttttatgtactgtctactgccatttgttcaaactctgcatttcgtgttcactggattccttattttgatactatctttattttgccataaatgtctaaagggaagggcattgttgatagaaccttttatatggtgtgatcgtgtgttatcctcccagtgttgcctctaaaattttccttatggtgtaactgcaatatgcatagtaggaaatgtcttattttatagaatcatatttgagtgaaacacttctttggaagctggaataagcatgtgggatctgttcctgtcggttatcagaagaatctaatcatgtttaatgcatgttaaggttgtgcatcagaatgctcactgttgtacctcccaatgtagctccggtggagttgtgctagcttcccgagatggaaagattgtctgtgaaaacacactggatgctagattgcaggtagttttcagaaagaagctgccagaggtaagtcacacgtttttctgtttcctttgacattatgatttcagaagtaattctgtccagtttaccatgcatcttccctcgcatctatggtctgatgacaacttctatttgacattcttatgtttacagattcgtcagagccttttcgggcaggtagctgcgtagccaattctgaaagcaga

SEQ ID NO: 5795 - DNA, 762 bp, Zea mays
atgatctgagggatcaaatacaacagacacgcttcctaaatgtcgtttaccggtcagccactgctttaggaactcgcctgcagtctttttctggtgcgagagagagggttgcaggtgctggagcatttctacgtcctgtttcaaacaaaacccaggtacatatgtgaccaggagctggcaagctgtatagtttagataaattaaggttgccttgcaatatagctcatgatattttattgaaagcaatggtgtggcatcctataactataagtttccttttgttagattaagcattcactactgtatgacattgttttggacatgattgtttcataaactagataaagtcttgatacccttttaaagccaactgttcaaagagctgaataatattattcaaatattcagtgcatgaaagatgtgcacagcatgatagctttgtgtctagttattcttcagaaactttacccaccggaaccgaagaattattgcagccttcttaacaaatattccaatgcaggttgtgatgaaacaagcacagaatgtcgcacaggctgttgctagaagtcggtctgcattttcctcatggtcatgcatgggtgcacgtcgtcgaggtgtaggtgtagttactgcatgttctaaagatgatatgagagtggaaacccatgtaacatcaacagttgagtcaaagtctgtccttgtagaacattgtggcgccaagaccatagaagaactgcagtatactgcagctagtgtttctgt

SEQ ID NO: 5796 - DNA, 472 bp, Zea mays
ggggtacaattcataaacaggcaatagaggacaagccttccctttctagtgatcatatgtaaggatctgtccaatagattgtgtatatgaccgcgtaaaacattgttttgcatcgtagacagtactgtttatggagtgaaagtgagataggagagctgtccagatagcctaagctagctagcttcatattcttccaaattgaatagatatatatactccatgcagttggcctttccgtttcttggattagtaacatcgcaaacaaaatagattatgttcattctagagcttgtcaaatttgatctcaaattaagccaaacagttaaaccatctcctcagatccattaatctgattctttaccctacaatgcaccccccaaacaacacctgaacactgcaagtcctccaaacgcacaattggatctgtacatgattttttattatgatacctgtgttatactacaacatcaac

SEQ ID NO: 5797 - DNA, 373 bp, Zea mays
gactcttcctgaatctaccatttcttagttttagcctttggggtaaggtccgtaaggatttagtgtttctagacctaagttagtgactccagtaagggtttgtgggagcttatcaatcatttttttacttatccaaccgctacaaatagatggtgtagtgatttgtctgatcaagtttgcttttgtcctgttttgtataatcatatggtgattttggaggaaaaaaactgggatgttatttttcacatgttgcgggatggttgcagtaaaggtggttagattactttggaacaaatagttcaatgttgataagcattgggttttctcaagttatggtcctgaattaattctgattagtgttggagcacaggag

SEQ ID NO: 5798 - DNA, 391 bp, Zea mays
gcgcgcgcgcgtacgacctaggaagtagcacgcaggggtggcggcgcgtcatggcgtagtaggctccgggaaatggaatccgggaatggccggtagctcgggcttcggcggcagctcgacctccgggtacggcggcatttcgaccttgggcagcggtggcagctcgacctccgggaacggcggcatttcgacattgggcagcggcggcaagtcgtgctctggcactggcagctccggcacggtcaggtggggctccccctccttgggcgtcgcctcctcctccagccttcgcgccgcgctgctcacggcggcgcaggaaaggagcagcaggagagcgagggaggagtcgaggacgcggtggttctcgaggccatgttgatcgtaacgtaag

SEQ ID NO: 5799 - DNA, 394 bp, Zea mays
ccgatcccgtgcagcttcagcttcagcttcaccgagcgagtgtcacacacacacacacacacacccagctgaagctgaagcacatctccaagaaaagctttaaagctccagtgctccacacagcagctcgcggtggttcgcgcgccctacccaacatttccgaacacaacacaggcatcgtctgcgatgggcgccggcgacgacgacaccaagcccgctaccatggaggtgacctccacctcctcgccgccgtcgctcccctccccggcggcgccaccgccgtcgctgctgcgctccgtgctgctgtcgtacgcgtacgtggggatctggatgagcctgagcttctcggtgatcgtgtacaacaagtacatcctagacccgaagctgtacaaca

SEQ ID NO: 5800 - DNA, 364 bp, Zea mays
tcttatatgtgtgtttccattaacatggctgcaactaaccattgctgggttcaggccatccatacagattgtgctttggcccatgttctccatcgtggaggctggcgctgggcatcccactaacacaaaggggtcattcaccagaggcggatgagggatgtccatgaagccgttatccatcacagttgagacaatataacaatggtggaaaacaaaatgagataaaacaccagagatctcaaagaacaggggcctgatgatatttctgcccagacagctgcagggttcctgagggtctttcagacatggatcgtagaatagacaaaatggaagaatatcagcaggagtgtagtaccaaagcaaa

SEQ ID NO: 5801 - DNA, 643 bp, Zea mays
tgactgtaagtacatggttttacattttgttgtgcatgttttgagtactacatatattcttctaaaaaaatgaattgcataaagcctcaaagaatattatttggtgtagtggtgactggcttgatattagactattaacattaattttcttgaaagtcttatgtttgttgttgagagcataaataggagcaatgttacttgcttgtttcagctgctgattctttctacataccatgtaggccttttgagaaaaacaataaatggactgaagcaggacagatgtataacccccaagcttacattcatccatggagggaaagatgattcaacattgtttgagagctatctcattgaagagcaagatgttgatggatcgggcttaacaactggttcaggttttgtagccttccgtgagagcgtgaggaacgttgcaggagagatcatacaggaagaaattggaagttagttccagctcgattacctttttggttctgctgcagagggtatcgactaggatgttttagccttaattaatgccgtagcagttaactgaaacgtagatagccaaaatggagagacaattcaatgaataataaaaggaggccacttgatgtatagttgcttctgtcaacaactgctttag

SEQ ID NO: 5802 - DNA, 500 bp, Zea mays
cgttgatagccttctgaaccttgatggatcgcaggatgttggtagcaacatggacctctggagcttcgacgacatgcccatcgccggtgatttcttttgaggattttgaagcttggccataggagtatgtacatagggactaggggtaagcactgcctctgcagatttctctgaagttacatgccatctgcacagttgtgctgggctaatttttttttgttccaaaattccaaatgtttcaggaataaagaccgggggagattgggaagcacctgcttggcaccttgggggtagcatttgctcgtgtctagctcagagatgcagaagttgcattctgaaactacttggttatcgacctgttccctattttagctatctctttatgagagccatttatgagactgaaccattttgttttgctttcttttcgttgttacaatatatggtttaacattatgatttatggatatgtgccaaatatggtgctcaacagtggtcaa

SEQ ID NO: 5803 - DNA, 400 bp, Zea mays
  misc_feature (391)..(393): n is a, c, g, or t
aaggtgataataatgttgatatgcatctctggagggatcacactacctatcaacaaatgaccaggggtcaagcgtatgaccaatctcggagggacgatacttatcagcaaacatgcagcagaggaacagaaaagttcagcaggcacgcaggactgcaagctaggcagttccaaaccgagacacccgccagccatgtctggcaccaacaacaggggcaagtggcagaagagtttccacaccttgacatcataaacgatttgcttgaggaggaccagatcaacggcagtataccagagtcatttcatcaagattacaatgtgtttggcctgccattttcaccaagaggaaacgtgtcagatatgggaatggcttctgttagaagtcctgctcnnntcaattc

SEQ ID NO: 5804 - DNA, 606 bp, Zea mays
ttgtcaagattgatccaaactgctccattgattttccaaaagggatttcattttctacaggaatgtctgaaattataaggtactccctccgtcccacaatagagtttgttttatcacttgttttttatgtctatattcaaataaatggtaatgaatctagacacatatacaaaacacatacactaattattatatgaatccaataaaaggctaaaacgtattttaatttggaacagagggagtataacgcactaaccaacttaggtgtgcatgtgaatatttttctaatgcttactcaagttattatggtatggtatcagtttgaaacaatctcttattgtattctttgaactatttatacataatttctgccaagctatcttatgtgtgccaactttctgtattaataaactgatatttgactatccgagcaagtcactatctctgatattgttttctaggacaatgttaaattccagcttgttggaattgtcataaagaagcttgaactctatcaacccaactgtttgtgcgttgatcaatatatggagcctttgcctttctaaaacttattgtttcaaaacatatatggagacttgttttagt

SEQ ID NO: 5805 - DNA, 392 bp, Zea mays
attaacaattttaattgtcttagtctgttgctgatgtcttctttctatggcctaatactatttcccttttttgtatcgaactagagcaaaatagcacccctacttgttacggaatagactcctgtcagcatagcttcgccataatttgcatctatgcaaaaatgattgtttgtatgtttcaggaaagaaatttctaactttatttacttttatcaaaacaattagtataagtatcacaacgtactgaatgaaacatgctgcatttgccaagaacctgcaactttgaaagtgctaaggatatacccatgttcatttctgctaaaaattagcttcatatgcatcattgaaacttcataaatcaattaatcatctacaaccattcagcacaccct

SEQ ID NO: 5806 - DNA, 863 bp, Zea mays
  misc_feature (795)..(795): n is a, c, g, or t
  misc_feature (809)..(809): n is a, c, g, or t
  misc_feature (811)..(813): n is a, c, g, or t
  misc_feature (821)..(822): n is a, c, g, or t
  misc_feature (824)..(824): n is a, c, g, or t
  misc_feature (827)..(833): n is a, c, g, or t
  misc_feature (835)..(835): n is a, c, g, or t
aggtgtaagatcttgaagggcacactagctgttggttttgatgctgatgccaatggtgatgtatgtaaaaccccccaaagcccagtttagctgtaaatttctatctgtagatccaaaggtttacttgatttaatttgtttcttgcttacaggtcactgcagttaagctaaaggatggcacagtacttgaagccgatattgttgttgtcggtgttggaggcagaccattgactactctcttcaagggtcaagttgctgaggagaagggtggaatcaaggttactttgcttccgattcatcatttttcaactccgagcagatcaccgcagataatactagggttgttttaataaacatgtgttagtgatgatgctattttctcgttttccttgttaaaaggtgcatttacacatgcattattctcttttgtgagcaacagcattcaccttagtttttctccattttggtttcactccgtgtccctgtttcttcttttataataatactcaactaccaagctttttgttctgatttataccttaatatctgacatgcccaaaatttccatgcagactgacgcttcctttgaaacaagcgttcctggagtatatgccattggtgatgtggctaccttccctttgaagatgtacaatgagttgaggagagtggaacatgttgaccattctagaaagtctgcagagcaggctgtaaaggtgtggctatcctttgttatctattgacttcactcttccaatttagtgtctgtagttcgtaaagcctttaacctggatcaaanttcccttcaagcancnnntgaacttnngntgnnnnnnngngaaatgcatccccccccccccccccccc

SEQ ID NO: 5807 - DNA, 393 bp, Zea mays
tgctgctgaagcgctactctgctggatgacattggcattgaccttcctaaagctccagcacaattaggtatggagcactttggaacctagaattcttttcaccctttaggtcaccaaattgttttcatgaaaaccttggaagcaaacccatcaggttaggttatcttaggctcgcctgctgctgctgctgtaatagacgcttgcaacagccttttggaataatcttcctagcagctttggcctatcaacctttttagtttttgtatcttgcgaaagacggtctcgtgtattctctatagtttaggtgtagaggaattgaggaacagacaatttggagctgtataattttgcgagatcagatgagtgttgattgttattgtttcggccaagaag

SEQ ID NO: 5808 - DNA, 468 bp, Zea mays
ataagggttgcccctggatcacatgcaactgaagctgctggtatgcgttctatatttacagcttctgcaatagttaccattcctatcacttggctgaatatctcagctttttttttgtcagtgaataagcaactgaacgacaaagaacgtgttgcggctgcattggagaacccaaacctactggacatggtcgaagagtgcttatcaccaacatttgattgaggcctgaatatcaatatatcggtgtgacatggtgttgatgttcaggagccacacatgctcattgccaatggagttcactcctgtctttcgagaaccaaaatgccttgggtgttaagtgacgtgttgcatgatttttttcctccgccccgttcagttattatatatgctactatggcgctaccctttttggacgtttttggtgcttgtgacctcactgatcaatgcgagatgtaatcagctcttgtg

SEQ ID NO: 5809 - DNA, 383 bp, Zea mays
gagcaccttttggccacccttccaccacaatgccaacaaccagcgatacgaacgcacagacagcgagaattataagagttgtatcttgaagcgcttcccatacaaacacccagaaactacggacctcactttctgtgaacctgtttactccatatatgtcttgcctgcgcttaatgctatcatcggctgtgcttagcccatccgtcttcgaagttgcaagtttttccgcaattccatcaactccaccatgggtgatgagcttcttactatcatggccctcaacaatagaccccagctcgtcggcacagatctgaaaccctgcagccttgacttcctcagggacgacgtactcgcttcgaagggtgaggccatgtagaaactaa

SEQ ID NO: 5810 - DNA, 466 bp, Zea mays
ataaatttggtgaggtcggccgatatagagagtgcgagacttgggcttcagttcctggaactggtaaggaatctgaaatttgacttgccaaaagcgttcagccatatcttttgtctacttgcattttcatatcacctcaaatcgaattcatttggcaggtgatgagaggataccctgacagccagggcccaaagctcgtggagacagaggacggcattgaggccatggagaggttccagttccatgagaacgagatgatgaggaatatggcgaatggtttggttgataaatactttggcgaagactatggcctgtgagttgtgccgccgatacatctgggtaaacgcgtggagctatttgtgggtttgaaatgtaacgatcctggaacagaaggatgcgccgttcatcatggtttccatgcaatttagcccctaatatatagctggaaatgtgaatgtgttgaaat

SEQ ID NO: 5811 - DNA, 470 bp, Zea mays
tttcgactactctgatttgtaggttttggacacccgaggcggattgttgactgcgctgggctacggtctgtggccttcaatggttctcctctccgaaatcgtccagacattcatccttgcagatttctgctactactatgtgaagaggtacatatcacatatggtctagcatctattatcagtcgcgcgaaagcattgagcatcgactaacgagtcacttctggcggcacacgcagtgttttcggcgggcaactggtgctgcggcttccgtccggggtggtctgaaaaactgcagcgagatagaaaagcatactgttcgttccttctgtgttactagatcatacaaagcgacagtcattgtgctcctagcgcccaaacttttgcactcgtaaagtggattagcagagggccgttaaattttttttttcagttgtaaactgtttacgtgaatactgtaccaacaccgtgga

SEQ ID NO: 5812 - DNA, 672 bp, Zea mays
  misc_feature (664)..(668): n is a, c, g, or t
aaagctgtttcatctaaccgtacaaaggcaacaccgatccagtcctctaagcagggtgtgggagttgatgtgtgtgcaaggtgtcgtcaaggtttcttttgctccgatcatggtgagtttgtattcgcagtaatcttgttttagttaaactgactgattcctatttataagtaagtgttacacaatttaccaccctgcacatatgtttggccacacatatggtcctttatagtaatttggtaaaagatctttattagctgcctattaaaaatctgttaaatggagcttgctctggtgctatgttttcaggatcacagcccaagccgcaaaagccagctgctaccgacgattcaaacaaggaacctgttgagaaatccgctgttccaccgcccaagaaaaggatcgatgtaaatgagctgaggacatgtaaaaataaaggatgtggtaaatcctacaaggagaaggataaccatgattctgcatgtgactaccatccaggtcctgccgttttccatgacaggatgagaggggtatgtatatatttgaaggatttatttgaagctatatgttgatttctgcctctgtaaacaactattctcgccatccctaaaccccatatctgttctgttcttgcagtggaaatgctgtgatgttcatgtcaggnnnnntttt

SEQ ID NO: 5813 - DNA, 864 bp, Zea mays
aggcagcattctaccctatcagggagctattggacaatgagagaaacgggaggaaattagatgcgagtactcttacttctgtttctacggtacttggagttatacaggattgcatgttgttttctgaaaaatctatttaaaactccaactccacacacatggagctatacatgatgcatgctattttctgaaaatcgacttttagactcatggtcatggataacacacacgccatgcatccaccaggttgtggggctgccaaccagggcataaaatgcctttgtcgaagtttttttttttaaaaaacttagtgctaaactagaatacacgttcgcttctgatgactcaacaatgttttgctacaatctgttaacataatgatgttgattgttaccttggaatatgttgttgtatttgttggattcatggatacaattcagatagacttgttatttggacttcaggttatctgttctgtctgtagttaaaagtcatgccgtttatatttggatactggtgaagatgtaaagtttgataaggagtcccacattggtttttgcttcttctcttcctactgctgtttcagaaacctagacctttgagacaatcagacttggagagagccttatcaacatctagaaagtgcaagaaggctgcaagttcaggactgcagtcacccttgtgggttcggccgacagattcagaagacgatcaggtacagaacgcgatccttgagatatctaagctgatgtctcgaatagttgagagcagccagtcagaaccccaagagccttcttcaccttaatctaatccttttgctagatcgcgtgaaaattctacagcggagtaaacgcaggcattacg

SEQ ID NO: 5814 - DNA, 1380 bp, Zea mays
  misc_feature (647)..(648): n is a, c, g, or t
  misc_feature (743)..(743): n is a, c, g, or t
  misc_feature (845)..(847): n is a, c, g, or t
  misc_feature (1209)..(1211): n is a, c, g, or t
  misc_feature (1286)..(1287): n is a, c, g, or t
  misc_feature (1320)..(1322): n is a, c, g, or t
  misc_feature (1324)..(1324): n is a, c, g, or t
  misc_feature (1374)..(1374): n is a, c, g, or t
ccgcccgcaagcagaggcgccgcatcggtgagctcatcgccattttttagcctacctacaacatttcgcgtgcttgttgaattcaaactagctaataaacaggtcacttgtcctgcccattgcaattgcctcatccccatcgataatgaaccagtgcaaggtttagtttgttgcaatctagtatgtttggtttcgtattggcttgctaaataagttagttttaacactagtttgttcatcctttaaactgtaacaccagttggctgttccttgtttgtaccatgacaccacctagtattcaggcctggcggcctgcactagctaagcctggatagctcccaagccaccacctaccgggtgtccgggtgaatatgctaatcgggtttgctatgcttgtatctgatttgcagtgcattgttttccctttatgctatcgatgaagtaaccaaactaaaagttcacttgctttactcaacaattgctttcattgatttacttgttatgtatgatttcccccctattgcacctgctgacaagcgtataatttaccctgctatgttctctgtgcagcacgtcaaaagaaggctgtgaagatattcccacgaccaactgctggccctcttcgtcccattgttcaatgccagacnntcaagtacaacatgaagtcgagggctgggagaggatttacccttgaggagctgaaggtgatgcattgctttgccattgtctttccatttgagttntattgagccatgttgctttcttgaatgttctagtttgtttttattggtgttctggaacaatctgctgttgtgtgtatacaatttgtatggcacttgttaatnnntgtgtgaactgctctgctgatgtttggaattttttgtagtcaagtagttttccttccctattccgagtatcagcatggtgtttacgttttgtttcagatgtggcttgattggcataagttttctgttgatcctcattcagctaccttctgacaagccactcttttcatcgatgtatcgtgttacatccttggtgctgatgattagagttaatctcatcgattgcaggctgccggcattccaaagaagcttgccccaaccattggcatttctgtggatcaccgccgcaagaacaaatctctcgagggactgcaggccaatgtccagaggcttaagacgtacaaggccaagctggttatcttcnnnaaggcgtgctcgcaaggccaatgtatgtgtagaaatactttcctgaatgccttgtcccttgaagacgcctctctnnaagacatgctggttgttttgacttctaatcccnnntngcctaccttcaatgcaggccggcgactctactccggaggagctgccacgncaccca

SEQ ID NO: 5815 - DNA, 250 bp, Zea mays
acttgctgaagatgcttgcagagaagcagcagctaaaacctctggtcgagaaggccaaacagcaaaagtcagcaagcccgagcacgagttgatggtgaaatgtcaatagactggtagcttttgccgatgtcttctgagcgtcgtgttatcttatcagatacattgccaagttggcagctcagataagataaattatgaccgatgttatttataccatgttgcacgccgtgatgtgtcagcagctatgcca

SEQ ID NO: 5816 - DNA, 1161 bp, Zea mays
  misc_feature (60)..(61): n is a, c, g, or t
cgcgatctgtgtgcagcatttgagtggccacacaactccaaacgtgtcacatgagaatgnntttatggcatcatcacggttttcttcttgtggcaactcagcattgcctactcagaagagccttgttcctcaaacaaaggtttgatgccaccctcagctcattggcaggatagtttttcatgttctcttactgatgatgcattctgctatgatgcttctcatcagcctctcgcagaccctcagcaattagcagcaagcaggcctaaccagtcacaaggaacaaaaactgatagagcaagtgcacaagcatctgcaattaaaaatgaaggttcacgatccagatgcaataaagctaccattccccattcgagaaacaaaggttggaaatgatcttttgctcttccgcttcatgtagtatgtgacttcattcattgagaattgttaagttgctattcagttgtgttagttatctataactgggccagggaacttatgtaaagttaaagaatattccagtgaaactatgttaactatatatcaactggaagttcaaaatacagctctatgagagaaaatttacagtccatacttttgttctgttctaagcaaagtatattacagttttcagctttggaagagtccgattgaccctgtagttacatagcttcaggcatgcaaaaatggtatctcatcttttttagtttactgaggccctgtttgaatacactatagctaatagttagctgctaaaaatagctttagacatccaaacagcccaactaatacttcagctattagctatttttagcaaatcagctaatagttaaccaactactatttgttagctaggtaattctactagtaactttttagcagctaactattagctctagttcattcaaatatagcttggatggctcctgcaccactctgatgcctaggaaccatctaacgtaaaaaggatgtgttggagtattatcttactagtaattatgtgaaatttgttctccaggcagcaagaagacgcaacagcaacctaatggacgtgttcatgcgatcaagttcccagtagagtagcccattcgtaggtatgccccctattggctttactttcttgaactcggatcctgacataatgaacttatgctgatgattcacagg

SEQ ID NO: 5817 - DNA, 380 bp, Zea mays
cccgcgcaggacgccgcctgggtgtggttcggcaggtgtctcgccgccgccaacctgctctacttctccgccaacctcttcgtcttcctcatcccgaggttcctgccccgcgccttcgaaaagtacttccgcatgcgcgacgagctgtgcgccaagacggccgaggacaagcacgcgcgcgagggtgtcgtcggtgcggccaagtcggaggtgtcgtccaagaaggcggactgagagctatcggctctcgcagtcgcagactcgcagtcgcagggcggggtgtaatttaaattcggtagcctgtggtgggcctgctgtaatttctccctgcgttatgtttaattgtcatcggtttgaccaatagtcgttagtcggggggg

SEQ ID NO: 5818 - DNA, 864 bp, Zea mays
aagggagcgtacgagggaggaaggagaagaagcggatcaagcagcgcaaggactttatcatggtgaatgccctttgcattctctatagccgttactgttattaatgtaataaatatattatttgatttactgtcgatctttctgctacggtattctgttttatgctatgtaagcctagcttgattttcctttatgctggaaggggaatttttttcaccaataaaatcttgagagttgataggtagatgtcgcctagcagtcccaagtgtcaccatgaaacggatctgcacaataactttttatgccacccagtcaattccagcggtgctcagcagagtttaaaatcaaccttcttttgattcactattttacaatctcttcattttcctggacccaagcaagtgaatggcataacccaagcctggcatagagatacatgagtaaactgaaatatcgaccaaagcaactcagtcgatatggctgagtagtgttacctggatctgagctctacgtttctagttagagctgatgtatcgcccttatagtttctaatgaaacacttaaaatgcatgtgttacttgtacaggctgagaagaagaagcgcagagctcagtattctgctgctgttaagagaaaggaggcagaacgaacagaaaggaagatggctgctgtggcaagagagcgggcatgggcagcaaggttgatagagctaaaacagattgaggaagacgttaaagctgtaatggcataagggcctgctctggaaaatggcaaggcgtctaacctgtttctgctgctctattttctcctcctttgttcctacatagtttaaattgtcacaattctttgtgatggatgaaaaaa

SEQ ID NO: 5819 - DNA, 519 bp, Zea mays
tgattcgatcgatatccaggaactaataatccaccgacccccctcatggcggcttcgtcgcgaatgggcttatccgtctacctcgccatcatggcggcggtgctcgcctcggcgctcggagcggagctcaccgcggactactatagcgagacgtgcccgcaagcgctgaccaccatcaagctcctcgtcggcgccgccatcctgagggagcccaggatgggggcgtcgctggtccgcctccacttccacgattgcttcgtcaatgtgagcgagcgatcgacgaccgacgagctacctagctggccatgcatacatagcttcttgtacctagctagctaatcaagccaccccgccgccgccaccgcgccatgcatgccagtcatataaactgtaactgtaacctatactacgttgcagggctgcgacggctccatcctgctggacgacaccgacgacatggtcggcgagaagacggcgaagcctaacaacaactccgtgagaggctacgatgtcatagac

SEQ ID NO: 5820 - DNA, 810 bp, Zea mays
  misc_feature (800)..(801): n is a, c, g, or t
  misc_feature (804)..(805): n is a, c, g, or t
gcttccggtacggacgctctcgccaaatgcgtatctccatctcctgaatgtcgtgcgatcgatggctgtatcgaaattatttttgaactcagggagtggcaggccaacattggactggccgaggcggtggaagatcgcggtcggctcggccaagggcctcgcctatctgcacgaagactgtgagctctcggctctttcccctctgttcctctccgccggcgaaattttttgaatcttctgtccctgacaaaaacaggtttattattatttttgtttggtgtcaggtcatcctaagatcatccatcgtgacattaaggcggcgaacatccttctggattataactacgagccaaaggtagaccccagacagccgaaattctttttattcttgcgtgcctgccctgcatgcttgactgaaagatgcaaatcttttggcacaggttgcagattttgggttggccaaataccaagcagctgaagtaacctctgtttctacgcgtgtaatggggactttcgggtaaatcgtctctgtgatgttggcacgcccagcaattttccttgcccacatacatcatcataacgcatgaaccagtgcatttaatagtggcataagactcaagaatatgtcatgtcttttcttttcgtcttcagatacttggcgccagagtacgctgccacaggcaaagttaacgaccggtccgacgtcttctccttcggcgtgatgcttctggaactgatcactggaaggaaaccaatcatgacatcttcagagtatcagcctgagacattagtttcttggnnctnnggcca

SEQ ID NO: 5821 - DNA, 408 bp, Zea mays
ctgtgatggactggctccaacagacataggcccaagactaccagggctcaatcgaattcctctatcatgtgagagacgcatccttagtctaacatctggactaggaccaatttgcgttaatccagaagaacctaagggtgagtaatacatattgatagcattagcatcaccaatgcttccatagctgttaccaaaaccagcattaccagtatagctgccatggctaccaaagcttccataactactcccataagaaaaaggaacctttggagggtagacattattcaaaggtaggtatctgtttacacttccaacctatacaagtttcaagtatggggcataatggtttaagaaagattccatatggttattatttctaaaactcgacacagaaacaggaaatgagaa

SEQ ID NO: 5822 - DNA, 989 bp, Zea mays
  misc_feature (937)..(941): n is a, c, g, or t
tagcaggtaattgcagttctaattattttgatgctgcctatcattgtcagtgttatgttcttgtggggcttgggtgcattgctcacttatattaaagccttacatttgtacctcacgagtccaaatctatttgtcaatttctgcttgctctgataatatggtcattcttgctgttcttctgcattggtactgctgctcccaggattgtgtgcttggttttatcattggcaactaaatataattgtactgtactgactgggaaaagattcatattgcctgttttgggaagtggaagatatagatcatatgcagccaatgggagatatatcaaacggacctaaatccttttgtatgaactatcaactgtgataatgcgcaatgtgacaagcacatagctcaacctgctttccctatgtttattattgattgttatggtttctgccaaacaactaaattgctatcataattgtctaatcatcactcttttgggacactattgttttcattctaaaatttacatattttctccattgtgtcaattttttttcttatatattgaacaagttcttgtcagattgctgtaaagtgtgctatctggactaaagaactgacaaacttccattaccatttgactctgcaggagaacagctcgtcctaggtcacttcttacagttgatgagtccgtgaaacagcaacaacagtgcaaatcgctcctttccaatgggcaaagccacatgatactagcagatacaacattgaactgtgaatcatctttgaagattccagaagatatgttacaacaggattgtgaatccaataatgaatccttgcatgaaatgggtattaaggaccaggagtcagacatggatctacgtacaagcattgaagatgacaaattcattagcaatggaaatctacgtttaccaggttcactagnnnnncatgttcttgaagattatagagctccagattctgtattagaaggctct

SEQ ID NO: 5823 - DNA, 950 bp, Zea mays
gcgtcaacggcatacggggaactggagagcctgctactcaattcttggtaatggcaaaaagatttctatttgagtattaggcccgctcctgaaattaccgaaattcactctgaaatttcgctcaattatttttagagaaacaaacttcaagtatgactttctaaaattattagtccaaaacaaataaaaatatcatcagcatggtttatgaccatatacatctatatataatatattaggttaaagaatatacaatataaacaatacaaaatacgagtctagagttatgtatttccaataaaacactacactagtgtccacacggtgacacgggtgcagtgtgcatcagcattggataataataatattatggtgatatgtggtatatacatgtacgatcattactaaactcttgggtctgatccaattgagatcttgtttggttaatcccgttacccatagattgaatgtgattggaaaaaattaagaataagtttgacttgcttgtgatttaaacccatcaaatcccactcaatctatatgaattgagagctaaccgaataagccctgactatttacagggggtgaattttgtggtgctatggcatactatggagttgggacaaacctggtgagctatttgaccaaggcgcagaagaaaagcaatgtcgccgcagcgagcaacatcgcttcctggcagggaacatgctacctgactgccctcctcggagctttcctggcagattcatatctgggaaggcaccggacaatcgtggtgtccctaatggtagttaccatggtaggtgtagccgtgtagccatgttcttgcggtttctgtaatcagctgttgggccatgcatgcatggtttacactttacagttccctgcttgtggtggttgcagggagtgctcctactgacactttcagcatccataccagcaagcattca

SEQ ID NO: 5824 - DNA, 399 bp, Zea mays
caaggcatcaacatggccaggtttgagatcaattgctgtctgaaactcctggatagcacggtcatcctcccctactgcatgcagggccgacccaaggtcacagtgcgcatcagcatagtcttccttcaggaagatggcctcctccagtgccttctcagcagctcggtactccccaacgccaaagagagcgctccccaggagcttgagtgccctggcatgagatgggcacaatatggcggcttctcggtaatgctcacaggcaccaagtaccatcccttcggcctccatggcaataccaaggttgacatggatctgcgggaggatgtccgcggactgtgagccaccagcctccgcggcttcaagggcaaggaggtactcctccttggcttcagcatagag

SEQ ID NO: 5825 - DNA, 474 bp, Zea mays
  misc_feature (466)..(468): n is a, c, g, or t
gaaggaggctgagaagttaattaacatgaaaattcatccgatgactattattgcaggtattacttgctgaatgtgttctggttaatagtatgcttttccatccttcacattggaaagcttggtaactattgtagcatgccatgttactaggtcttgcttgcatcaatctcatagtaacaaatcaaatagatcaagcatacaatacaaggtatattgatggattctactgttaagtcattcaaaacttgagatgcggcttacttttttttttacaattcatgttttcagattgacctttcaattttcttagtaataaaaatgtataggcagtgcactgatgttctgattctaatctgtcttgtgttgcctgttttataccgagataactagtatgtattctggactctggagcactactaatattcattctagatcactgctttgtggtgagcttcaatgtcacgannnggttaa

SEQ ID NO: 5826 - DNA, 610 bp, Zea mays
gatgcctacgggggagctgcaccccctggtttccaggcgcccgcaccagcataccaagcgacgccctggaaccccactcacggtggtgcatggcatcaggacgcccttgcacactccttcaacactatgacgctcaatccaccgaacgctacttccgagtggtatgccgactccggtgcaggatcacacatgacctcggacgctggtaaactctctgctatttcctcgcccacttcattcactcctacatctatcattgtgggaaacggtgccttgcttcctgtcacagccactggatcacacactttttctttcccgcatcgcaatttagttctcaataatgtgctggtgtctcctaacattattaagaatttaatttccattcgtcgcttcaccaccgacaataattgctccattgaatttgatccctttggcctttctgtgaaggatttgcaaaccaggaacgtgatcgccaggtgcaatagctccggtgacctctacccgttccatgcaccctacaccagcacctctgcattactcgctgtacccacctccctgtggcatcgtcgtctcggtcaccttgggcatcaagccttgtccaaactcatta

SEQ ID NO: 5827 - DNA, 474 bp, Zea mays
  misc_feature (461)..(462): n is a, c, g, or t
  misc_feature (466)..(471): n is a, c, g, or t
cgcgaggacagtccccgacgccctgacctcggacgagatcgaccagctgctccaagcgaacagagagcccggggactacagcggctggtaagtaattaatgacggtaatttccctccccgatgctcgctcctgcagcagcagcagcaccaccagctctcactctctccgtttgtctttttttctgtcctcgaaagggctggcgcggaagcggagtggaagatcctgtacagtctcggcaaggacggggacggcctcctccgtaaggacgtcgcgaggagcgtctacgacgggactctgttccaccggctcgcgcccagatggaaatctcccgacagcggcagggagagaagctgataagcgtggtccgggagaactgaaccgagaggaccgtcctattgatgtcgtcttgcgctgggctgctctgaactgaacaagtctggacatgccgtcaagcgacatnngggnnnnnnctc

SEQ ID NO: 5828 - DNA, 371 bp, Zea mays
tcgcgccctccccgaccatggtctcggcggataccatccgtacggctatcggcgtcatcggtgagtcccctggtcgtccatttcattattgttgtcaactttgactaacagcatacgccgtacgcatgcatggcgagcatatcctccggccgatcacgcgcggtggcgcctgctgttttacatgtctttttttttcttccacgttctcctcctcagtttgctgttttactatcaccgttgattttttaaatttttttaactattcctcttgtttaaaaaataatgagttatcatattttttatttattttattatttaaggtaatttgttcttaacttaaaattttacatttttgaattaatattttaaat

SEQ ID NO: 5829 - DNA, 925 bp, Zea mays
tagagattactgtgtctcctttttttgattcatggttaccttttgaaaccttatactggttattgttgcacaggatgtttgcttagcttcttttacattatttgcagaaaggcggtggcaccattgatcttgaaccacgccttagtcacacatcagctgtggagcctacacttgctccagttgcggttgagcgcacaatgacgacaagagctgcagcttccgtaattttctttcaatctttgtttttcctcaatgacttcactcctgattgataaatgtttatttatttcacagcagatttcataaaagcaatgtttcctctattcaaaactaagaattttccaatatggttgatgcagaatgcattgcgacaacaaagatttgtccgtgaagtgacaatacagtacaacctctgcaacgagccatggtgcctttctgtcctgcatcctaagatctcttgattgtattagttcactaaggcttatccagtaccagtattgtcatctctagtttatttttcagtctgtgttggtgaaatatgctcttagttgtttgcttgtataaattagtctcctgtttagttacaagctatttttattgacttttttttgtatgttctgacaccttccttcaggttaaaatatagtataagcattgtggcagacaagggattgaaaaagtcactttatacttctgctagactgaagaaaggagaagtaatatatttggagacacattttaataggtatggacgtttgctactacttctttagttctgatgatatgttcttgcttccagtttgtgcttgcatggaactcactgctcactgttctttcaattttgttacaagtctccacaggtacgagctgtgcttcagtggagagaagcctcggggtatggatcgagctctaatgcatctgatgc

SEQ ID NO: 5830 - DNA, 764 bp, Zea mays
tatcaaaatctatcaacttcgtgcacacacggagaaatcttgttgaaaatgaccgtgttttgctgaaccgtgcacatcgtgctcaacaagaatatgaaaggtacattgcgttttatttattttttaggtcaattgcagtagttatactgaatctggccagaaactgcttcaacacgaaagagatattgtctacattttttttactctgtttatttcagttggaatatttgttctatctggtcaaatgaatgtgttttcagaacacgtactgatatggcatgtctttgtgtagagtggccaactattgtcttaaattagctggcgaacaagaaaagctggtgagtgaaagatggcttccggagctgagaaatgcagttcaagaagctcggaggtgttttgatgactgccagcgtgttaggggcttggtaagccaatactagctttggtttaaattcctgtggctatgcctttgtttgtccaccctttcatggcgtcaaacagtatgttacatagcaacaactccattggttagatctgttgcagtcttgtaactcttgttatggtaaaacctgttagtcctgtgaccagtgaactcatgcttctatgttatttgcaacttccaggttgatgagtggtacgagcagccagcagccacaattgtcgattgggtaacgatagatggacagagcgtgggtgcctggatcaacctcgtgaagcaactccacatggagatctccagacggacgctggcaatgtcatctgta

SEQ ID NO: 5831 - DNA, 360 bp, Zea mays
tttactattggcttatagaaaaatctatgaggactgaacaaccttttcccttttaagtcggttcccttttctgcggtttagccgaagctccctttcgcacagcttcggattgatggagccttcgtcacaattaagctcttcatcgtgtatgcttttatcataaatccgaagatacctgtccataaagcatacttggaagacattgttaaattaagtttttgaggaccttcggaggacgaaggcccccaacattagtggactcctcaacggggactaggccttcgagggctgaacctcagtaaaacaaatcacccgtgtcccttgtgtttattgcttgtgatttgtttgttctctcccttt

SEQ ID NO: 5832 - DNA, 811 bp, Zea mays
agggtatcgatgatgaagcaacaacaacaagagacaaatgcattggatcaacttgaactgggtactgtgaggactttactctatggggccattgctggttgctgtgctgaagctgctacatacccatttgaagtggtccgtaggcagctacagatgcaagtaaaagcaaccagaatgaatgcgcttgcaacatgccttaagattgtcgaccaaggtggggtaccagcactgtatgccggtctaatccccagcttgttacaggtatgtattctttcagcagagaacctacttccacatatatgtaggggccaggttagcatccatagtattttaagaagtcttcagaggtatactctagacctaccaaatttcacttgaagtatatcatcgattgcttcaagcttatggtcgaagtaaaacatcagctgaatacgaatctgttcatataacttttgtatgctaacttgctaagcagtaaatagtatgcatgcatatacttcgactaattattggtcacattcatgacgtgtgacttttttgaatcctaagctatgaagatagtgtatatacttcatttgttaatgtatcaagttagcaataaggaaacatatttaaagaaagtgataaaaggttcttgacatatccctgcagtgatgctggtttacttaaagagactgagattagcagactgcatgaacttagagatctgcatgtatcattttgatcctactattcagtgtgataagtgtatgctagtctgtttcagattgccttaagtttctggttttctttctacttttgtttaggttct

SEQ ID NO: 5833 - DNA, 1006 bp, Zea mays
cgctgccctgaccttgaggtactgggtttcttgattttggtgtaattttttttacatttcaaatggtatataactcctaaaccaaataaaatgatgattgcttgtcagccactttaaactcctttgatgttgagcaactacacaaacacaatataaataaaattgttacataagccgtattcatgagttattctgggttatgtcttggcactttctttattcattatacccaataactgtacaactgggaacttgtgttttttcctgtatttctggcataagcaagccggatttgttttaaaatcattaaaaaaactggaactcagctttcccagatattggatatttttttgcagctagattacaatgaaagtctcgttccccagaaattacattcctatgaaagcaagcatgcattgatctcacttctctttgtgccgcattaggataaacttttttgtgacttatattatctagaagtgtaaattatgttttgtggaatctttgttcttccttgggagattgccttcacaccaaccctttcatgttgcacattgtggttttttgttggtgagcatcctaccttatttttttacttgtataagtcgtgatgtggctttatgtgtgtactaggcatatgcaaaggaaattgatgaacacaagagaacaatactccttgttaacaaggctgatctgttgccgttaaatatcaggtctgaatgttgtttatttgacttgattgtatagtcattattgtcttagtagtgacgtcatttcacatatgtttaatgcaggaagagatgggctgattattttaaggcacatgacattctctatgtgttctggtcggctaaggctgccactgccacattagaaggcaaaaagttaagtggatactctgaaggagaatctgcttcacttgatttggataccaagatatagaaagagatgaactcttgatgaagctgcaagctgaggcagaatctatgtagctcagaggaggtct

SEQ ID NO: 5834 - DNA, 407 bp, Zea mays
cgcaggtacgaagaaggcgacgaacatggcgaggctggccttggtagcggcggtggttctgtgccttctattagcgacagggccgcagggggccgtcagcgccgaggggatggtgtcatttgacaatttgatcagctgcaaggtactgggcaactgcgataagaacctgggccccgaggcctcccgcccagggaaacccgccaacgactacacccgcggctgcaacccgatcaccggctgtcgcggctgatcatatctctctggtcgatgtgcgcgcaatgtcaatgtcgcacgcgcgtgcaggtaccaggccttagcgtgtggtgccgcgtgtgtgtgtatatattacacacatgcattatacattggtcgtcgatcgttactgtatgcatggcaactgatgttta

SEQ ID NO: 5835 - DNA, 783 bp, Zea mays
  misc_feature (777)..(779): n is a, c, g, or t
tgcttttgttgatgattcagtttactcaacaaaaatagaaaagcttaactgtaaaaggcagaggatttctggggataaagatagcgacagagccagttcaagtaaccagtataagaatggttctggttgtgataaagaagtcgaggattcacggaagcttttcctcgatgctaaaaaatgtctttatttattaaagagaacgttggaagatctgcaaaagaaggatttgttcccttacaaccccaagcctcttcttagaaggtcagtcgtatgaccatgggttttgtatgttgtctggtacttgagtaaaatcattttcttgttcctgcatttgcctcttctattattcttttggcatatcaactccatggcattgtcaatttaaatgattgaactggaaattttagcatatcaactcaatggcattgtcaaccttatgattgaattggaaatcttggcatatcaaatcaatggcattgtcaacctaaagactgaattggagtttttggcatatcaactgccaggcagacatggcagctaacaaaattgtggtagattataactcatgtttgcttgaaactgaaccttaatttctcgcttggacagacagacatgttattttatcatatgttcatatgaatcatgctgttatgcctatagtttgttcttgtagcttggcccggttccaggagctgggtgagcaggggtgaaattcgagttaaacctgctgaggaagctactatctgtagaagttgaagaatgacccttgggcagaannngttg

SEQ ID NO: 5836 - DNA, 636 bp, Zea mays
ctgatgggcagaaacaaggcgaaggaagcaccccaattcaggaggtaatgaccgactccgacctggatactaagaccttgttcgtttacatcggattgcacccggaatcgttccggttaatcaaagtttatataaattagagaagcaatccggctcggaatcgttccgacccaccaatccgacgtaaacgaacaaggccttaataatttggtttccgtatggttagtggtttctcattccacacctctgcttctccgcatcctggcaggattgaagtcatggtgacatgggctgggtcatccattgtctgagttaggtttgccagttttcgtgggggtgcaggaaagagctagagccttgttgccgcagaactccccctctatggatcgcatgcctagtatcgcgagtttttatgtatccttactgtggatgctaacaagattcttgcttatttttgcagtagatggtactgagaacagaatcagatgttgtaaactatacatacagtcgtgcatgttgccgaatggaccattgtttcggtcgtagcgcttgtgtcggtgcctgactgcagtctgcagagcgagatgtcgccctgccgcctatccttttctcggagtgctttattacaagtttgag

SEQ ID NO: 5837 - DNA, 380 bp, Zea mays
tgggctaccggcccatgctcacgctcaaaatggacggcccgctgtatgttcgggcatcgctccggcaatgaggtgtgggcgactgggcggcggccacgaagtcaaaatacgttgcgtactgttatgatactatcttagatattaaacttgttaaaataaatattttattttatcttagctaaaagactgaaaataatacgagttgaagagaaactcaacctttttgttatagctcgctcgatctctcgtcatctttcaactagcgaaatggtattatatgaaagtgttgtactatgtatacgtgtgacttcctttcgtattagacctcggtagtatctggtagcccatctatgatgtaatgattgattaataagcgagaa

SEQ ID NO: 5838 - DNA, 431 bp, Zea mays
acacttgcactccacactatgcatacggtcatggagcatgcagctcatctgcattgcttttgccatagctacaaaaatttcagcacaactgaacccttcagaagcttttgctgtagctacaaaaatgtcagcacaactgaacccttttcctcagaagagacctggatcaagaatgtccactcaagcaaaagcctgtaagatgatgagcatggaaagcatatggtcacttattttaatcatcaccattggctagcactaacaaaataaacattcagttcatcagagagttgaaccacacagtcactcggtcctccatgtccaccctggtgggtgctgatccctgcagatggacattccattaccagacatacccgaagcacaaatgaacatgcctttggagtagcatacaaaggaacagccatagagccact

SEQ ID NO: 5839 - DNA, 387 bp, Zea mays
ggcgaagcggaattgattgcgaccaccaccaccacgtcttctccacctccgtccgatccgtcgtcaccaagccaccatcattggcgccaccgcgccgcccgcccgcgggagcccagctgcgcattcttaactgtttctctcttggcttctcggcgaagtgttgcggttgcgggggtactggagtgcggagagcagcgcggcggtacgtgtgcgttgctgcgctgtgcttccacagtgagctaggggagagcgagggggaggaagcaccacccaccacaccacctccattaaaggcgctcacgcgccgcccctccgcctccacgagaaagcgaggcgggagcgagtgagcaggggcgtacgtccgtcgtcaaggccatctctctcctc

SEQ ID NO: 5840 - DNA, 372 bp, Zea mays
tcttgcagatttctcctgaaactgttgaaagtggccatactagtcggaggcggggagcacgtgaaggaagagcttatcaggaggatcagcttccagttgcacaaagctactgttaaggatctcttattacctgccacttcgcctaatgatggtacctatgatgttcggctggtgcataatcttgtccagagatttgttgcaagaacagcgctgtctcataatggcggtttcattgagaagtccgacgaaaagatgattgagctcaacttcgagcaagaatccattttgtcggtaggagagcttgttgatggctacctgtctgaagtagcttcggatcaagacctttcgttgtctatgtttgttgaactggcg

SEQ ID NO: 5841 - DNA, 461 bp, Zea mays
tcttcctgcagatatgttgtaacgattcaaagtcccatgctttgcaaaaacccgtaagtgctagcattctcctaggcgatacatttgtaggacccaaactaactatctttgttgtgcttgcaggttattccaggaagaaaaacgaaccctctccatccactgcaatgagttgcctgctagagcggaatccagcgcggaggatgactcgcttccaaaagaagctcagatttccatcatccccgatcaggatgagctacatgatttcccagcctatgctacttgatttgcctccaataattatgtttgatgtagaaaaaaaaacaccattttggaggcgcaggggcaactgagcaacactatgtattaactatctcgtagatactacagcagaggctccttgtaaagcaggttgagacgatcattctgcagttcttattatataggatgattacgaaggtaac

SEQ ID NO: 5842 - DNA, 371 bp, Zea mays
aattgctcccacatcatcgagtcgagatacagggagcatccccaaatcagtcaaacaagacgcatgaagaatacattttcttttattttccgagaaaattcaaacccaaccagtgcgccaagcatatgcgatggcatgcagatacgccgcgattattgctgcaactgctactaggtatcatgatgcgacggggtggtggccattgaggaagtcgaggaggagctcgttgacccgatccgggagctgctcctgcacgaagtggcccccctccgggatgtaggtaatcttcaggtccggcatgaagttgtccatggcgccgctgcgcacggcggtctcgaaccccgggaacttgaagcagtagtccttctctc

SEQ ID NO: 5843 - DNA, 698 bp, Zea mays
caggtaccgtccccgttccttttttttgtactctgatactctgacttaaaccagcaagttggttaattctgtgcgaagttactgataaaattcattatgtaaacgccaatgttcttatgtggtgaccgtcaactctggtgccgcgacccaggcttggctcatatatttctggaggagggctaagaccaacaacgtggaagaagatattgccgaggagcgattgcacatgtggatcgatcgacacggccagcaaccaacgtcacatgacgctgtggatggtataatttcttttcttctgactgcttttcttgtagtatgcttgtggctgttaccacagtaccacactgaacatcgaagaagccacgacggtgattgctggccgtgaaaatcagtccggagatgacttatataccttgggcattgttctcgcagttgagcaaggcatacacgagctgaggaagcttggcatcgagcagctcctgtgggagctctcccgccacgaggcgaaccttgccaaagacagtccgtctgatgtcgaggacctgacctaacagtaacagcctgagcggacgacggtgaccatctcccacccaaatgcagtccaggctccaaccatatatttgtatatcatacagaaaactgggacatgtaaacattttttgtggttttggttttttcagctttgtcacaaacagttc

SEQ ID NO: 5844 - DNA, 546 bp, Zea mays
gctgaacagccccatattgctcatcaccaggaactgatgtcgctgttaaatcaatcaacgaacttgcagcctatttacatcataatctaagcacgccacggagtttggcaacttttttcatcttcggttgatctttagaaacggagaggccacagccacacaatgtttgcatatttgcaccgtccaggtccagccatgactagtcacagaaacttggatattacacgacaggatgtccagaaggctgcagttgctgcttgcacaatcgcaggattctggtagatactgtgcatggacaacagggaattagtatgcgcaagttacacgactacagcaatactatttaacacctgcaggtttaatggaatttggaaacttatcgctacatgactatatctccctagacgatgatacaataattcaagtgcttgcaaaatgaaatgtgggggagatgctcacgatgtaaataccattacaatctaagtttctgggaatcaaatctccctaaattcagaaactgttacagtctaagttcctgaataggcg

SEQ ID NO: 5845 - DNA, 482 bp, Zea mays
tagcaacttagcataaccacctacaatcctacattgatttccactcagaagtctatattatcttttgattctgaactttttcctctccgtatcaccagattccagagctggctgcttctcttatggcaatctgtgaagtatttgggtgtctttctccaagtgtttcctggacactgagaactggagaggaaatatctgctcacacagtcttctcgaatgcatttattcttctgttgagactttggaagtttaaccatccaccacttgagtattgcataatgggagatggtgctccagttggctcgcagctaactcctgagtatcttctgctgttacggaattcccaggtcctatcttccagcagtttgtcaaaacaacgaaacggacaaaggcaatcacaagtatcaacttcacacccatcatctggaaatcctatttttatggactcgtttcccaagttgaagttatggtaccagcaaaaa

SEQ ID NO: 5846 - DNA, 277 bp, Zea mays
tcggttggggtggtatttatagcctccacaccccaaactagccgttggacagaaagcagcaactttctgtcgtcgggtgcaccggacagtccggtgcaccacccgacaactactgtggagtgtccggtgcacgccacgtcagccgatcgttggcagctgtagcagtcgaccgttggatccgaccgttgccgtctgtccggtgcacaccacacaggtactgtgcactgtccggtgcgtcaccaggcgctggctgacagccctcttctcaggtttcttt

SEQ ID NO: 5847 - DNA, 720 bp, Zea mays
ctggggtaagctctactatactgggtagtgagcgtcaatccttttattacctttctagtcaatacaaaatttcatagctgaacaaccctttttaagaacttttatggatgtgtgtcatctagctgtggctgtgtttattttattgccatggtaggtcttccagttagtcatttcaccatttgatgctaatgtctcagcacctggaattaaagcaataatcgggggctggcaagttcttttgtttactcctgaacaagctacatgatcattgttccctggctgatggctttgttaactccaagttggtttctggtccttgcaggtgccatttcagaatgctatgaagagtccgtcgttcttcagcaggatgcgttggtctatcatgcttgcactcgtggagagtggagacggctctagcgatgccatttcagccgcaaagtgaactgatttaaccgaatgtgtgacatcttccaaaatactggttgcgtgtacttaacttgtggagcgcttgaaacatactagtgtaccaggctgcctgtgttgagacattttacttgtacacatggtcggttttcgttcttcctcgcttgcgtatcggtatcgcacaccaacttgaaattgaaagtcgtcaacgttcttctagttcatacggtcaggaccctgagtttgcatcaatcaacagctaaaaaagggccatatgctagcgatgcaagtttgaat

SEQ ID NO: 5848 - DNA, 799 bp, Zea mays
ttggccccttccttgatggttttttgactaaccaaaacgtctttgcttttaattatacatcacaagttgtggtgagttgcaaaacatctttggtgcacatatccctacagtttccatcacactctaagttttctcttattttgtgtgcagtttttcattgtgttgtcatgcctgatatcagtctcagtgaacttcagcacttttcttgtgattggaaagacgtctcctgttacttaccaagtcctgggccatcttaaaacatgccttgttcttacctttggttatgttttgcttcatgatccatttagctggagaaacatacttgggatcctaattgcagtagttggaatggtcttatattcatacttctgcacagtggagacccagcataagaacactgaagtctccccacagcaggtacctttctcatgcactggagaaatttcagtgtgaaccattaaattcttctgccctttcattggcagtggcccagtgtgtaaatatgttatacgagtacggagtacccaatactgaaagtgtgctattgtagtggtgaacattgaatttttctaattttttctctctctaaatttttacaattacctgtacatggaacaaactaggctctacgttcttttactgtaaaaatgggacaatatagcttttgagcaaaattttgacatgtactattaacgtatgtattattacagatccatctgttcctgtctcttgtttgtaatcgccaactgtttttcatatgttgcaggtgaaagaaagtgaggcagcccctttgatctca

SEQ ID NO: 5849 - DNA, 439 bp, Zea mays
acgatgtacttcctgaacatgacgggcatcagcgtcggcggctacctgctgcccatcgacccggcggtgttcgccatcaacgacacggacggcacgggcgggaccatcatcgactccggcaccaccatcacgtacctcgcggagccagcgtatgacgctgtccgcgcggccttcgcgtcgcagatcacgctgcccttgctcaacgttacggatgcctcggttctggacacgtgcttccagtggccgccgccgccgcgccaatcggtgacgctgccgcagcttgtgctccacttcgacggggcggactgggagctccctctgcagaactacatgctggtggatcccagcacagggggcggcttgtgcctggccatggcgtcgtcttccgacggctccatcatcggcagctaccagcaccagaacttcaacgtgctctacg

SEQ ID NO: 5850 - DNA, 390 bp, Zea mays
tctgtgtgatctaggtatgatgacaacgtcgaacggagctgagcgagaggagcacgagtggagaaggatcttcctagcagctggatttcgtgactacaaaatcacagacactcgaggtatcccgtcaatcatcgaggtctatccatagtgagaattgagagagagagagagagagagagcatcttatcctatcctttatacgtataaatccttattaattgcaataaagctcaattattctcagccttccataccatctcaagttgcagtagtactagctagccatcagattatgtcgttgtatcatcatcatcatcaagccattcattgtcgatcctctatctgatatgcgtcgatgtttgcactgttggaatacggtctgaattctga

SEQ ID NO: 5851 - DNA, 641 bp, Zea mays
gatggaaagtgttcagacagctcttcagaatcaaacaaccaagaggcttctgattattatcgctttggatggttgctctttttagtcctaagaatccaaacattcagcagattcaaggatcttgtgacatctacgaatgaactagtttctgtgttggtaagaacgtctgctatgatcttcgcaagtgttttctcttcgtttgcagcaagacaattgatgtatactgttagttaacttgaaagtaatggatactgcttattttgcatgcctgcaggctgtacttatcattcatattcctgtgcggctaaggaatttcgatataaaggattcatcctactttggtaatggcaaccaatacgtatttgacagatgatgtttgctaatcatggtctgctagttatagcagtcgtggcataaaactcatgtgtccatttattggtttgaatcaggtaagaaatcagataggggagtcagtcttattgcttctttgtgtgaaaaatatcatacctcagaagatgagttgagcaaagcactggagaagacaaatactctcatactggatattttgaaaaagaagccatggacagctacttcagcatgccaacaggataatttgactttcattgatcccaagaagggta

SEQ ID NO: 5852 - DNA, 361 bp, Zea mays
tctcgaatcatgtcattgtcagtaaagtaccctaaagcacgatttgggtcagaccagcccggtgcgaacataactagcgaccagcacggtaggccacgagcaagatctaaacacgatctgtcagtataatcgtgccaggctgaccccacgacatttaaattacaaaaataaactaaaatgagcgcagatattggtttagctccaaacatacattgatacccacctaactacactccattccacggacatcgtcaaccaaccagctctagatcccacacaggatcagaaaccttgcatggtcggcagcagcaggtgctctaccaaaacacgagcagcaacacgagatttgctgctagcaaac

SEQ ID NO: 5853 - DNA, 332 bp, Zea mays
tgcatcatgacagcaaatgaataaggataaaggagttcactatattaagtaccatttggtgcataatgaggaagggcaaagagtaaagacttgcctctataacgaggtctacatctttgaaacgttcataatcaaggacaccagtaacgagagacatagccttctcatatcgctcctcggtcatttttcctttctttactcgactctgcaaattggctggggaaacaaaatagtaagtttacctaatataatcgaactgattgaaatatcaaaagattttcctaagaataagaaggatttaagatggacaacgaccaatatgcaagcagtca

SEQ ID NO: 5854 - DNA, 396 bp, Zea mays
cgaacgaagcggctcgtgaaggactgtgataaggagagcgaggcggtgaagactatgcagggtaaactgctgctgaagcggatgtcagtggtgcaggacgtggcggatgccgtcatggctctgggagacgtcaccgatggcaagggtttgctcgggagctccacgctgatggcagcagctggactgctctcggcgttgatcagcacgcataagaattggaattcttgttgaagcctggaggtacatgttatagatagcacatcatataatgaaataaagctctgattatagcgataactaagagtttcctctggaaatatggatgctcctaaaactgataccaggtcctctggggaatgaatgaagtttattcttattcatttggttggaccaagg

SEQ ID NO: 5855 - DNA, 436 bp, Zea mays
cgctgcgagcccgagcagcggcggcggcaatggattcgtcgctttttctctgcgagcccgaccagaatgagttttgttaggatcaaaccatctcatctcagcagcaatgacactatagcatggcatgacagttacctctcgggtaccttgctgtcccttagtagcggtgcgttggaagttgaggtgctcaagctcaaggaggtctttcagttgcttggtcgcgcccgtgacgcagatgtgcgggtgtatccaggtgctcgacgtcgcaaccagatagttcaagggacgctccacgtagtcccttggctgcatctgcatctgcatctgctttgcctgtgacctcctcctagttcttggatgcagctcgttgtgctgcttgcttgctctgcgtcggcttctgctttcggctgcttttggcgtcctaatagtttgtagt

SEQ ID NO: 5856 - DNA, 515 bp, Zea mays
ctgctgtcgcccatggccagcgccctgctcaggtgatggatctcgcgctccctgtgccacacctccagccacttcttccactagcgcgcagcacccctcctccctgctctctatttggcgcaggaacccccatggtgccttgaaatggttggcgtcctccacttggccagaaatctcctcatccatactcgctgcctttcctcgcgggtcgcgtgcagcgagcatcccttgccgacgtcctccctcgcctcgccagccgagctccttcttggccgagctctcctcatgcccgtcgcgcctattcccatccagatctcgtgccctttctccagtgcagcagcactgctgcggggtttccttgtcgcgctcgtcgtcggcctccaaccgggtgtgcgtagccctatccgtgacgccatcgaaacccgtggtgagaaaacccccgctgcccttgctgctattatttttgtgctcggtaaaactgttgaactgttgtgtgtgtctaattcgcagctaac

SEQ ID NO: 5857 - DNA, 1016 bp, Zea mays
  misc_feature (948)..(953): n is a, c, g, or t
  misc_feature (965)..(966): n is a, c, g, or t
ccattccttctgtagttagtttcttatttctcaagctactcgtgactgactactgaggcattacctaagctagttttcttcctttcatgataaatatcatgtacacagtcaattgatgtatttattgttctggttgcccaaatgatttaattgctgtgagcttgttgccacagcttactttatccacagtaaaaatgtcagcaactacatatgacagctatacaatctatgcttgttgcctgtcaaccatgctcatttacaggactatactaccagattttctcatgtgttagctaatgaaatcccctcgtcatgtcctacctcttaagcgtaaaatatcccatgttacttaaatcatggttgcacaattctcatctatatgaaggcaaaataactaggtataagcataatttatcttcaaatgttcttctgtggttgtactttctattaggaggcccttataaatcctcaaatatacaggttgattaactttgctatgtatgaagcataaacattttagttatccagcctttttagaaggctcaaatatttgacgttgttatatatgaaatatgaactttgtagttattcttctataagcccaacctgtggtggccaaatggcatgggaaagcaatccttatacaacgttgagattagtgtggatgtaaaagggtttggagaatctgattcctggagccattattttggattccgcaagattgagagtacaattgatgattctacgggtgggaggtattaatgaaatgcccaaaatgtgtctattcgatatttgatatcttgaaaacatattgatgcaaatgtaaatcatgtccaggatcttcaaggtaaatggtgaacctatttttatccgaggagggaactggatattgtcagatggccttcttagattaacaaagaagcgatatatgaccgacatcaagttccnnnnnnacatgaacttcnnatatgcttagatgttggggtggtgggctagcagagaggcctgactttatc

SEQ ID NO: 5858 - DNA, 444 bp, Zea mays
actttattcaacttctatattctagatgattgcccataagagaatggtgacacttatttgatctcttgctattcttttttcagatgtgaagaccaagtgggagaacagctcatggggcaagaagctgattgtccagaagaggagagcatcgctcaatgactttgataggttcaaagtcatgctggcgaagattaaggtcaggaaccttcctgtcaaatgtctagttcctgttgacagtgtctatattgctggctcacactttctttttcttttatgtgaacagaggggcggtgctatcaggcaagagctcgccaagctgaagaaggcgtccacggcttaaggagtctctttccgtgaatgtcatgttagagtttttggttatgagttggatcagcaattcgattgagcgttgtcaaagccagaattaccaatatgttccctgta

SEQ ID NO: 5859 - DNA, 390 bp, Zea mays
ccgtcaaggacctacgattccctcaccgacgaattcagctacgcgctgcttctaatcacgatcgcagtcctggttgctgccatcatcgtcacatggatttggtccgagaagaaggagttgggggacaagtggaggtgagcgaggtctcaaagttgttacgcggaagaaaatttcgggccccagtcagctagctcccttgttttggtcccccccttttttcattttagtggtagagttcacttcacctttgactataggcattttatttatgtaaccattcgacaagaagaaagcctatctactgtgaatcgacacactgccgaagcagccacctgtgcagctgaaaatttctggagatggcatcaaaggatattagcagagcgcagataa

SEQ ID NO: 5860 - DNA, 562 bp, Zea mays
gaacaccagactgttattgaaggaatgggagaactgcatcttgatatcattgtagacagactaaagagggagttcaaggttagtattctgactagctgcatttatgcagttgcatgcgctgtatgtttctttaattctattctatatagaaatttattattcggtcattagctgttgtcgagtcagagttttgtacctgtcacattacctttacttcttttatgcaaacgatctgtgcaggttgaagcaaacgttggagctccacaagtcaactaccgtgaaagtatttccaaagttgcggaaatacaatatgtccacaaaaagcaatctggtggatctgggcagtttgcagacattattgtgcgttttgaacctttggaagctggaagtgggtatgagttcaagagtgaaatcaagggaggggcagtgcccaaagaatatgtaccaggggtgatgaaaggattggaagaaagcttacccaatggtgtcctcgccggttacccagttgtggacttccgggctgtgctggttgatggctcatatcacgatgtcgattcaagaa

SEQ ID NO: 5861 - DNA, 285 bp, Zea mays
gaaaagtgcaatcaatttacttgttgttatagcgctatcaaaggttgtgattcctttttattatagtttgttgaacacacatagtactgacttcaggctgagcaaaacattttaagggattgttttgctatattgtattccatgactttgtcattctatatcaagtgatttcaatggctgcatgcagtctttcatatttgaacacacttgctatttttcacagaaccatgtagtttgttgaattaactcaaaaattgagatgttgctgtcatttgcttacacttt

SEQ ID NO: 5862 - DNA, 360 bp, Zea mays
cacgcgtgtctggagagtcttgtggaggctctgaagcaggccaaggaggatgctgctgctgctgctgctgctaaggcactagctgacgctagggcggccaaggaggaagcggaggaggcgaaggagaaagaggccaaagagaaagacgaggcaacaaatggcaaaggagcagcagacccagcagggaaggacactaagatgagcaatggagatgttactgtcaataaggaaggtgatgacgagtgacaagtatagaatggagacgagctcgctcgcttgctagtgaagtaatggagaaacatggctataaataatgacaccagtggcctatgtaaaatagtgtagtctctagtgaagatt

SEQ ID NO: 5863 - DNA, 397 bp, Zea mays
gccccctatggctcagctcagctcagccaactgctggagtggtagtggttgcttcctctctcttctcacgtcaccatgatcgataagactagctagaatataggtggctggcagtggcagtggcagtggcagcgctatcctatatagtgccccccggccggtgtgctcgcgtcgggagctagccttggaagaagaagcagagagcagagacgccgttgcgtagagggaggaggagtgcttcttcgttcgtcgttgcccaaaggccaaagcagcagcagtcacttggaattggaccagagcggcgcgcgctgccgagtgccggccggccggccgacctctgtttgtagcggcggcagcaccagctctcaactgctcaagcaaaccaattaaagcagcc

SEQ ID NO: 5864 - DNA, 488 bp, Zea mays
ggcttcttgttccacccagattctcaaggtacgaaaacctcttggttgcaaccggcgagatcttcgtcagcttcgggccgacgaagtcagctagcgccggcgaaaccggctccattctccccgtcttctctacctcggccttagcgtctgagacgaccttgtcggtgtcgtccgaagctaaactggcggcgattctcatcgattccgtgttcctgagatctcgagcggccaagtccgcgctcagaacgtcctcgatccgagacatgaccgtgaaagccaggctctccagagtcctggagtagctctccaaaatggcaaggccaacatcctgacgaatacaagggagggaggtacgcaaggcattcgaatgaacaaacaaagcaacaaatggcgtatatctgacgaggcatcccagtcccatacataccttgttgcattggatcttgcttatgtccagcgccgactgggcaatgccaggaaacctgtgc

SEQ ID NO: 5865 - DNA, 385 bp, Zea mays
ccaaagctggcggtgcagttcaccgggtgcgcgcggctggagccaccggcgaagagctacgtgatcgacgtgaaaccgggcgtgaagtgcatcggcttgcaggagggcgagtggcccggcgtgtcggtcatcggcaacatcatgcagcaagagcacctctgggaattcgacctcaagaacatggaggtcaggttcatgcagtcgacctgcacccggtgatcgtaaagctgacctcgatggttttgttgatcagagcatttgaagggaaatgttttttctgaacataaaaaaatagaaaacgaaaatgatgctctgcataaatcaactttctgcacgagatacatattgatattctgcgcgatttgctatccttgcatcgaaccta

SEQ ID NO: 5866 - DNA, 360 bp, Zea mays
ctgctcttcgttactcataacagatcaaactcgggactccccattcttcttcgttcagcttcttcccacgctcggcagcagctgagctcatcggcaatggagccgccgccagtcccggcgctggtcctcgcaatcgacgagttcgcggccaacatcgaaggtgtgtgccagccagaggagtccgtagagagggagtctccccagcgtcgtccggtgtttgctgctgtcccttcactggccgatgtttgcatgttcctcaatccgccgtcgatgggcaggcgagagcggcgaggaggacgccgaggagagcaaggacagtcgcgtgcctaccagcagcgccatggcgcgcgcggtagagtc

SEQ ID NO: 5867 - DNA, 467 bp, Zea mays
acctgataccctctaattacgagctgattataccactacacgtgtttcatatttgagcatacgaaacccttatttttctgcagaatatcagaccaagtgccgataacttgcccgaggagctgtcagaaatcctaacatcctgctggaaggaagacccaaacgacagaccaaacttcacacagataatacagatgctcctacactacctatccaccctttcgccacaagagaccttggcgggcccccgccgcacgttcagttcggagaacacaatcctgcccccagagtctcccgggacaagctcgctgatggcttcgcggggcgacctcggcgacacgcccaagggcaagaaggaagacaagccgaggggcttcttcttctgtttcagcgagtgctattagcacgagccccccccaaagggggaacactccgagaagcttgcaaatactgaacgaacaccgtctctc

SEQ ID NO: 5868 - DNA, 350 bp, Zea mays
agtggggcgtgaggtgctgaagttggaggccgagctcctccagcagcagcaggaagaaaggcgagatcggcagcgccaacccacaggagaggtaggagacgaagagcacgaactccccggcggcgagatcgccgaggggagaggcgccggcgcggatccttccggcgaacgccggcgcgctccatccgagcaggttgcgcaccaggttgagtgccacctcggactggaagcgctcgggatggactagcgaggccatggcaactacggcggcggaaagcagaggagcgcaaatgcaatggggcgcggagagctcgaaggcgaaagggcgcaacagttggaaagaatgcgaa

SEQ ID NO: 5869 - DNA, 375 bp, Zea mays
agttgctggtatcaacgtttcattcatgctggtccagatgttggatctgaagtcaagtaatttcctgttcccaattcccctttacacatatctgcggatttcacattttgttgtttgaactgtcatatttatgcaggtgttccatcttctaagtatggaattcgtttccttgaattgcttggacgtgatgagaacgcctttgaccacctgtactgtgtggcctttcggttgcttgatgctcagtggcttgtgaaacgtgcctcctatatggaattcaatgttagcatattgagtacattgatccttctctttctgttttaagacactggcattcttaatttcttacttctttggctttgttgtaccaggaggtct

SEQ ID NO: 5870 - DNA, 374 bp, Zea mays
cctgtggagaagctttcttgctatgtttctgatgatggaggggctctcctgacttttgaagccatggctgaagctgctagctttgctaatatgtgggttcctttctgtcgcaagcacaacattgagcctcgcaatcctgacagctacttcaatcttaagaaggacccatacaagaacaaggttcgccaggattttgtcaaggacaggaggagggtcaagagggagtatgacgagttcaaggtcaggatcaatggtctgcctgactcgatacgccgacgctctgatgcgtaccatgccagagaggaaatcaaggctatgaagaggcagcgtgaggccgctcttgatgatgcagtggagcctgttaagatccctaa

SEQ ID NO: 5871 - DNA, 564 bp, Zea mays
tgcaatctgattctctctaagaatagagccaccaatgtaactagtatcaagcttaaaggtgttgcggtgagttttcagtcaactaaattgaaacttgtaatttggtaaatttctcatcaatggtaacactgtaaacttcatcagattggaaatgcagacttggatgataatttgactctaagagcatcatatgactactattggatgcatgctatgatttcgggaaaagcttataaagccgtcaaggataagtgcggctttaatgggacatacactgaagactgccaaaatgccatggacttagccacccaagaaaaaggaaatattgatgactatgacatctatgcaccaatatgccaagatgcctcaaacccttctaaatcaagtgactcggtatacaacatcgtacataaatttcacagattgacagatgttttaacttccatttctatatgaaattttggtatactggaactttttgtttactatttcagttagtgtttggtgatccatgcacaaaccactacgtctcctcttacctaaatcgtcctgaggtccaaaaaa

SEQ ID NO: 5872 - DNA, 517 bp, Zea mays
tcctgattccttgctcggcttgcgtggcccatggattcgatgtcatatcatgtgttgtttgctcacccgcctggtcgcagttcgtgtcggatggcgtgttcttcgcggagctgaatgagatgctcgcggaggacggctactccggcgtcgaggtccgcgtcacccccatgtgcatcgagatcatcatccgtgccacccgcgcccagaacatactcggtattggcgcttgtacaacccccattccattacagaggtgattactttggttttctagtgttttggacttttggttgctgaaactgtttttcttcttcatattccttaagcgagaagggccggaggatcagagagctggcttctgtgattcagaagcgctttaacttatcagagggtggcgttgagctctacgcagagaagctgaacaaccgcgggctctgcgacattgcccaggccgagtcgctccgctacaagcttctcggtgaactcgccgtgagaaggttatgctcttgaccgtaaa

SEQ ID NO: 5873 - DNA, 1203 bp, Zea mays
  misc_feature (384)..(385): n is a, c, g, or t
  misc_feature (387)..(387): n is a, c, g, or t
  misc_feature (389)..(389): n is a, c, g, or t
  misc_feature (393)..(398): n is a, c, g, or t
  misc_feature (412)..(416): n is a, c, g, or t
  misc_feature (426)..(428): n is a, c, g, or t
  misc_feature (430)..(431): n is a, c, g, or t
  misc_feature (434)..(439): n is a, c, g, or t
  misc_feature (441)..(441): n is a, c, g, or t
  misc_feature (458)..(459): n is a, c, g, or t
  misc_feature (462)..(462): n is a, c, g, or t
  misc_feature (471)..(471): n is a, c, g, or t
  misc_feature (473)..(478): n is a, c, g, or t
  misc_feature (482)..(483): n is a, c, g, or t
  misc_feature (486)..(490): n is a, c, g, or t
  misc_feature (497)..(501): n is a, c, g, or t
  misc_feature (503)..(507): n is a, c, g, or t
  misc_feature (509)..(509): n is a, c, g, or t
  misc_feature (511)..(515): n is a, c, g, or t
  misc_feature (518)..(518): n is a, c, g, or t
  misc_feature (530)..(543): n is a, c, g, or t
  misc_feature (550)..(553): n is a, c, g, or t
  misc_feature (557)..(558): n is a, c, g, or t
  misc_feature (562)..(565): n is a, c, g, or t
  misc_feature (570)..(574): n is a, c, g, or t
  misc_feature (576)..(576): n is a, c, g, or t
  misc_feature (579)..(581): n is a, c, g, or t
  misc_feature (584)..(587): n is a, c, g, or t
  misc_feature (589)..(591): n is a, c, g, or t
  misc_feature (593)..(594): n is a, c, g, or t
  misc_feature (596)..(604): n is a, c, g, or t
  misc_feature (606)..(615): n is a, c, g, or t
  misc_feature (617)..(632): n is a, c, g, or t
  misc_feature (636)..(641): n is a, c, g, or t
  misc_feature (643)..(647): n is a, c, g, or t
  misc_feature (649)..(653): n is a, c, g, or t
  misc_feature (655)..(655): n is a, c, g, or t
  misc_feature (665)..(669): n is a, c, g, or t
  misc_feature (671)..(680): n is a, c, g, or t
  misc_feature (682)..(695): n is a, c, g, or t
  misc_feature (701)..(703): n is a, c, g, or t
  misc_feature (705)..(709): n is a, c, g, or t
  misc_feature (718)..(720): n is a, c, g, or t
  misc_feature (724)..(730): n is a, c, g, or t
  misc_feature (732)..(737): n is a, c, g, or t
  misc_feature (745)..(747): n is a, c, g, or t
  misc_feature (751)..(751): n is a, c, g, or t
  misc_feature (753)..(776): n is a, c, g, or t
  misc_feature (778)..(780): n is a, c, g, or t
  misc_feature (783)..(783): n is a, c, g, or t
  misc_feature (785)..(788): n is a, c, g, or t
  misc_feature (800)..(803): n is a, c, g, or t
  misc_feature (807)..(815): n is a, c, g, or t
  misc_feature (821)..(831): n is a, c, g, or t
  misc_feature (833)..(837): n is a, c, g, or t
  misc_feature (839)..(843): n is a, c, g, or t
  misc_feature (846)..(867): n is a, c, g, or t
  misc_feature (871)..(886): n is a, c, g, or t
  misc_feature (888)..(892): n is a, c, g, or t
  misc_feature (903)..(920): n is a, c, g, or t
  misc_feature (922)..(923): n is a, c, g, or t
  misc_feature (925)..(940): n is a, c, g, or t
  misc_feature (945)..(947): n is a, c, g, or t
  misc_feature (949)..(954): n is a, c, g, or t
  misc_feature (956)..(963): n is a, c, g, or t
  misc_feature (965)..(965): n is a, c, g, or t
  misc_feature (968)..(974): n is a, c, g, or t
  misc_feature (983)..(988): n is a, c, g, or t
  misc_feature (996)..(999): n is a, c, g, or t
  misc_feature (1001)..(1026): n is a, c, g, or t
  misc_feature (1029)..(1032): n is a, c, g, or t
  misc_feature (1038)..(1047): n is a, c, g, or t
  misc_feature (1058)..(1075): n is a, c, g, or t
  misc_feature (1081)..(1085): n is a, c, g, or t
  misc_feature (1087)..(1099): n is a, c, g, or t
  misc_feature (1101)..(1110): n is a, c, g, or t
  misc_feature (1112)..(1113): n is a, c, g, or t
  misc_feature (1119)..(1119): n is a, c, g, or t
  misc_feature (1121)..(1122): n is a, c, g, or t
  misc_feature (1125)..(1134): n is a, c, g, or t
  misc_feature (1136)..(1150): n is a, c, g, or t
  misc_feature (1160)..(1163): n is a, c, g, or t
  misc_feature (1166)..(1168): n is a, c, g, or t
  misc_feature (1171)..(1173): n is a, c, g, or t
  misc_feature (1175)..(1185): n is a, c, g, or t
  misc_feature (1193)..(1200): n is a, c, g, or t
aaaacgtagtacaaatcaaaacattgcatcaaattaaatctttgcatgctaataggattgtaatgaatttggaagaggggattggacaatagtgtttagtttgactgcttgggtgtctcatctcacatatacaaagtacatattgtaatatggagggtgaagtagagagccagagtggattttgtagtcgctggctcaggagtgcccgacagcggagcaggtcctccatgtgctcgacctcggtagacaggaagaggtgtggagtaggcccagtggaggtcctccctcgccatccgcgcaccaacctcgtcgtccggtggataaatcatgtctccacattgtaaactccaaatgcatggcaatcatatttgcctgcaaagattnnantncatnnnnnnggcaccacagatgnnnnntactgattannngnnccnnnnnntngatgtaaatccttcatnnttncgaccccantnnnnnnattnnaannnnngtgagcnnnnntnnnnncncnnnnntcncgtgactgtgcnnnnnnnnnnnnnncattccnnnnaccnntctnnnntgccnnnnntnccnnncgnnnnannncnngnnnnnnnnnannnnnnnnnnannnnnnnnnnnnnnnncttnnnnnntnnnnnannnnngntttccccctnnnnncnnnnnnnnnngnnnnnnnnnnnnnnctacannnannnnnctcccaacnnncgtnnnnnnncnnnnnngccccctnnncctncnnnnnnnnnnnnnnnnnnnnnnnnannnctnannnncccaatcccccnnnnccgnnnnnnnnncccctnnnnnnnnnnncnnnnnannnnnttnnnnnnnnnnnnnnnnnnnnnncgannnnnnnnnnnnnnnntnnnnncacacctccannnnnnnnnnnnnnnnnncnncnnnnnnnnnnnnnnnnctctnnnannnnnntnnnnnnnncnctnnnnnnncccaccctnnnnnnctcacccnnnntnnnnnnnnnnnnnnnnnnnnnnnnnnacnnnncctccnnnnnnnnnnccccccccctnnnnnnnnnnnnnnnnnntttacnnnnncnnnnnnnnnnnnntnnnnnnnnnnannaccccngnnccnnnnnnnnnnannnnnnnnnnnnnnntcctttcttnnnnccnnnccnnncnnnnnnnnnnncccccctnnnnnnnnccc

SEQ ID NO: 5874 - DNA, 773 bp, Zea mays
aagagcacatgtggttactgaacaccacttggttgaacagctctggccttggcccacctactgtttgcgccatgtagccgccgccgtcctcctggagatatatatcgtgcagactaatcacgatcacgatacagtcgatactctggagctgaaccctggacgacggccatgtggtacagtggtagagggcaaggaaacagaaggcagacctgcgggaaagagatgctggcgccgccgccgccgccatcgccgtggagctcgtcgtaggaccggggggaggaggcagaggcggtggcgtgcgtactgtccgcgatagcctcgaatggaggtctgctcagggcagagctaggaggcatcccaagcgcctcgtggtggagctggagcatcccttcgattttctgaaacgcgtggattgcaatgtttcctgtgattcgtgaacggcatggcgacagacaggggatggaagagacagttggggcgcggggcgcagaggttgtgagatgttgcgtacttgagtagtatggtcatcagtgctgaaagcgtcagtagtgtccaagccaaagccatacagcagcacagggctcagtgaagcgatcttcatggaaaggaactgcaatgcaacggacgcgcccaagaagcaagcggactttccagttagttacagctttctaatctcaacatgtgtcgtcgtctaatctagcaatttatttatttatttgctcagtgtatctatcactatcacctcgacttggttctgcaaggactgcacgtag

SEQ ID NO: 5875 - DNA, 595 bp, Zea mays
tggcccttgttgaacagaaggttcatacacgatgaagcagaattttactaatctcgacatccacgtgggccagtcttactcatttctggtcactatggatcagaacgcaagcagtgattattacatcgtggccagtgctaggtttgtgaacgaatcgctttggaccagagtcaccggtgttgcaattttgcaatattcaaattcaaagggaaaagcatctggtcctcttcctgatccaccaaatgatgagtatgacaaaactttttcaatgaaccaggcacgttccatcaggttcgtagaaaagaaagaaactttcttcatggtcattgactatttcaagtgacagcaggcttgccttttcaatgcaatcttactgaaaacattgattcacccgtcatgtcctggcacttggtatctgcttctttgcctcttttcttgaaagggcgggcgctatagtgtttttaatttttataacaccctttttggctatatctaattacactttgttagtactgctgtgtatacaagcaatatagctctttctagttgttgtctcattgcttttctctatcttgtaatatagttcatgtgcatc

SEQ ID NO: 5876 - DNA, 504 bp, Zea mays
cgtctctgctcctttttgcctgactgtgctttgtttgcctgctcgcgaatagaaatggattgactgtgctttgtttggaaaaaaaaatgcagcccggtgttcagccacctggcggggaagacgtcggtgtggaaggccatctcgccggaggtgctgcaggcgtccttcaacaccactccggagatggagaagctgttccgctccaagaggctcgactcggagatctttttcgcgcctcccagctccaactgaagcaccagctctccaagacgggggagaggagatcgttctcgattgtcgtcaaggtcatggttattaataattaagttagtgtcgtcgtcttaagttagcgtcgcgtcgtcgtcttaagttagcgtcgtcgaagtcagggtagagcgagaggtagaggtcgtctgtcatccgccattgaactggaactgctttttcaagatgaatactacccctctttcttaatcatcgttattactgctgcgaaagttgtgt

SEQ ID NO: 5877 - DNA, 260 bp, Zea mays
cttgacctattctatcctgcagtttcctctttgtgcatctgtgtgaggcctatctcgggattctcccccatttcggcctctggaagtatctgtatcattgtcggcccgggatggctgggggacagcaccatctcgttggcggcgccagtctggagctgcgtcgcgggaggaaaatagagtacctcgacatccccctcaaggatagcatcaaggggtggcgcctcgagtggttcattgtggagaaccactgcaagtccctc

SEQ ID NO: 5878 - DNA, 368 bp, Zea mays
gagctgtgctggtgaatggtgctgtcaagcgaccggctcagcagtttctgtcaccttcaagcaacaaggagaatgtgccaccagtgggagctttgagggctacaccaaagaggaggacccccttgcctgactggtacccgaggacaccactccgtgacatcacatcaatcgtcaaggtggtggactatttccttgctattttatgcgttcttctctgaaagcgttgcacaccatcaccatttctgctaatgtctaattccattttgttgtatttggtgcatgcactgtactctataatatgctacagtgcggtgcaatgtttcatttgtcagtccttgtgttcagaatgcctggttagtggccaacaa

SEQ ID NO: 5879 - DNA, 777 bp, Zea mays
catgcatatcctgactaggactaggattacaattgtcatagcttttatgctgagctacagctaggaggcacttgctctccgcattttcttaacatttgctctttgtagttccaagtttgttcgttgatgaaaagtgaaagtgcgtaatatattattaaaaaaacgatgataacttacatcttttattgcaaccctgtatataaccaagttttagggctatagtattagaaacgtcgcatgccatggaccagcggaagttggttgtaaacttgtgctagatgtttctgtacattcaatggttgaggagaaatgcagccttatatgatatctaagtgtcacgagttgcaagctcgatggttgtcatggttaactattgtgcactttgaagtctccttcaaacttctccataatcaattggatttgtttcctctgaattatggagccaatgtttatgctgatgttcatggtatacatgagctatctctgttctgctgttccattttgctcacttattattttcattgttgtggacttgtggtatgatgatccagtactgttccatgattgtgtactaattgttgtgtgaaatcaatatctcgttatctttttgaattcaggtgcaccgcaaactctgattcagagctgcctgacctttgggactttctcgtacatcatagagacgctaaacaagcagcagcccgcactggcgctaccactggctacagagattaaggatcaaaaggctggacaaagtgttcttcctcccttcacgctccc

SEQ ID NO: 5880 - DNA, 383 bp, Zea mays
tatggcagccgagtttgccagcgctttctcaagtcggcgccgcttcttctccgcctgcttctggcggtccagctcgtccttggcctgcttcttttttcctttcttcaacactttgcctgcctgattgctgctcatggtagccctgtccatgacagccgtgcctgctgctattcactattacctctggtagacctgactcctctactcactactaggtataattagggaagaaagaaaacaaaatgttcaaacttcattctttggcctcattggtttgtctaacttttttttattttaataacgaggaagaaaaggaaaggaactgttgctaagatgggtgggtgagtgcaggatgctgctacacccactcaggtctgaatgag

SEQ ID NO: 5881 - DNA, 422 bp, Zea mays
cgcttatgtcagcgatgtcccaaaaggcaagcgtgttggggtgcattgaagcaattgagaatgcatcctgatcaaaaatgtaacctgagtagtgtactagcatcactggactcgatatattgtttcaccgcttctgactactactgttgttggttcgttgagcctgaggaatcaggtggaggagaggatcgaggcgtaggaaggagaaaccctaatcgtcaccgtcgattcctgtacttcttctgtagacataaaaaactcaggccacagggaagtcaagtgctcgaaactcgaaaggcaaggaaattcatacaatgacaaaaacaatagcctaatctgctgccatttactatcatacacgtgtgccccaatattactcatttactcccatcttttgttttcgtatataatgcgggattgtc

SEQ ID NO: 5882 - DNA, 382 bp, Zea mays
gcgctcctgccaatttcggcacgaagaggaacgctgactcgaacgatttcctccctctgaagctcaggaaactaagcggggctatttagtggctgatttatgaaaaatatctggccgaccgttttttgatatgcataagaagcacaagtatgctgttacctgaaacagcatgcagtaatacttaaccacgttagggcttcagaaggctggagatggacgcatttggtggtggcaaccattgtaaattgtacgtttgctcccaaatcgttgcatttggcatcctctgacccactggcctgcatgtttgtatattttttgtgtgatatacggggagatgtcttgtgccacgtttcctccgtggcgtgtacattcaaacaaattg

SEQ ID NO: 5883 - DNA, 365 bp, Zea mays
  misc_feature (357)..(358): n is a, c, g, or t
gctgtgctcacatgcgtctggtcgaattcaggcccaacctttgagaggccaaaatcagaaaccttggccaagagattttcatcgagtagtatgtttgctgacttgacgtcacggtgtatgattgactgggcaaaaccggtgtgaaggtagtggagccctcttgctgctcctacgcagatttccagtcttttcttccagctgagaggcggcatatcaccgccataaagatggctcttcagagttcctttctccatgtattcatacaccaagatcatctcgttgtgttcatcacagtaaccaatgagcgacacgagatgacggtgtcgcagccctgacagcaattcaatctctgtacgnnactccct

SEQ ID NO: 5884 - DNA, 761 bp, Zea mays
tttccgggtcccgacagtgccggatagaatcggtccaccactccccgtaccccgaactacctgacctgagagagagaccgtgcctccctcgccgccgccgccgcagcatccctagtcggagaagatggccgagaagccggcaggtcccaccccgaggacgaggatccgaggcggtctcgcggcctcagctccctcctccaggtctcccttcccttgatctgcatttgcaccgccgtttcgtttgaatctttttgaactcgctccagctgttcgtttcgcattctctgatgcaggaggctgtcttccgtatctttcaccgcggccccgagcaagatcaagaaggtgcggttccactcatgcctttcgaaatacctgcaactttgctctggtctttttagcttttgggatcagttgtttgttttgttgggtagtaagtggggttcctgtgatcgatgtttcaatctttttttgtttgtttcgtctttcgtgtaccagtagtgtcatagaagctggtgtgactgggcacgggacactgcattaatgaagtagagcggggaatatcttttaatagtgaacattggcggttaccagaaatgcaccatgcgactgtggagtactaaacatctctatgtgcaggttcctgaccctccaaaggccgtgaggccatcaagagccacacctgccaagaagcggccacaagtggatcaagctcagaagcggagagaagaggtcgctgctctgcaggagcagcttaatggcct

SEQ ID NO: 5885 - DNA, 375 bp, Zea mays
caatgtttaccagtactttaaagagaagaacacagcactaccaaatgctgaagtaattcacacaaacagatcaaaagctagtcttacaaaaccatcggtagttacacatcttgatcggtcgacggactccacaaatgacacggtacgaagtctttgcggcaaatcatcagcattccgatccaggtcaatcgacgagtcagcgattctgttgctagaacctctcccacgccttctattgctgaagaagggtaacgagcaccaaaaaatacaaatacacgcatgcggcatgccatcatacctttcctactctagatgcattagtgcagtatttcatgcaaaacatgaaccattaacttgcaagcctacgtgggtaaa

SEQ ID NO: 5886 - DNA, 828 bp, Zea mays
ggaaaaggtgtctgaacatgttagtagtcggtcagaaaaagattgtattgcaagatttataaggctaccttttggagaacagttcatgggacacaaggaggatagaatgaggtttgagaatactgatgacaatactgatgagcctggagcaaatgtctcaaaacgactacgtctcactccactagcagatgcaagcaatccaattatggctcaggtctgtattgttgctttttactctgatgttggtggttgctagagtacttttaagcaatatgccatttgattgggtgggcctaggagctaagatggcagcaccaatacaaattctttttgtgattagaacttttgagtcgtcgcctgtatataagaatgtcacatgtcaaccgccctttctacagtgtccttgttattagatgtataggtcacttcctcaagtagcctttgttccttgcatatataacccatattctttacctcagaacaaaaggataatatttaaacaatttctggcatgacattctcaaaactgatccctgacttaggtgtgcagtgtgcacacaaatgtcttacattggcctgctggtggaaggcatgtttcattagcttccttgtactgtattgttgttcacttcggatgtttggaataactgagtgagaaatctgagtaactgaaaatgttttcccaggttgcatttttatcagccattgtgggttccgatgttgcctcagctgcagcgcaagcagctatttctgcccaatcccgtgttgaccttaatgacggcgagattgaaacttcaataaatagcatcaagcaagaaaaatcatctc

SEQ ID NO: 5887 - DNA, 645 bp, Zea mays
gtccaagaagatgtagcttctcattccgttcttttgccctagtaacggtggatgagatccttaagtgcacccggattcttcgcaaagtgattgatctcagcctgcggggaaaaatgcccaaatgatggagtataaaatattttcgtacataatatttaaaactaaaacgataaaaaaagagattaaacatgctaaaaaagaaaattaaagaatgctgaccttccgtattgctatagcagttgtgacaagtttatcaccaattaactcatgcaaaaccttatctgcagaaagcgattctacagattcctgcaggttctgcggtagccttttcagttttgaagagtgatcagaagggtttgattctacaaagaacacgaatcacataagatacttgcatactgtggtaattatgtttattcattcagtaccgagcgcttatcacttatctggttgttaggattgtttccaaatattaccagcaaggcataaattttggaaacaataaccaaaaggaaaggactggcataaaggaattcataccaattggctcaggcaacttaaggtgtcttcttagcccatcgatgccagcagctacgatagcagcaagacccaagtgtggattcgcgcaaccatcaaaggatttga

SEQ ID NO: 5888 - DNA, 374 bp, Zea mays
  misc_feature (366)..(369): n is a, c, g, or t
tcgagaaaattcctcgtcctaaatgagcttgtgcctatagctggttttgatgatgcttcagtcttagtgaaagataagcacgtgaataacaacggaggaaaatgttctgcagcacattagggcgttggggaagctctttttttttggtcacatgggtagcaaatactgggtagaactgctcgcttaagcatggaccaacgagaatccaatgagatggtgatgcaacattggtcttgtttgggcagactgctgcttactacttccagtgtcatgccagcgaggagatgagatggtccatgggtgctgtgtggctgaattcccagcccataaagccaagtccctctctgatacttggaggtcttgctnnnnatgtg

SEQ ID NO: 5889 - DNA, 422 bp, Zea mays
ggggggacaaggtcccaggtgacgtcaaggggaaagtcgagtcgaagctgcaagagctcaaggatgctgttgctggtggctccacgcagacgatgaaggacgccatgagtgcgttgaaccaggaagtcatgcagatcgggcaggccctctacagccagcagggtgccccaggcgcaggacctggtgcagctgatgcttcttctgctggttcagcgggcacttctgagaagccaggtgacggaggcgatgtgattgacgcagattttactgacagcaaatgagggggcatgctaggtattagatggaggcggtttgccgtgggagctgttttgccgcgagggagataatttgtttccacaagattgtctaggatgtggatgttctactttttggtagattggcacctaactgtggaatgaata

SEQ ID NO: 5890 - DNA, 865 bp, Zea mays
attaagtaatccatttgttgtcgtaagtgatctcgatcttgatccgcataaaaataggttattttattagttcttacattgtctcgatctttatctccttttctatgattctgtcacttttgtaggtgttcaaatctaaatatcatggtattttatgtctcgatttgtagtagtgtatggtcgcaattgtggtattaattggttgatgggcgtgtttagatttttgactttgttttcgtgtttttgtgagggaagtgattagggtaggaaatgatgtctgaaagtgacgagcacggctcgctcctagacaagatcaacgagaagatccacgagtacaagcactcatcgtcgtcttcctcgtcagactcagatgatgacaagaagtccaaaaagtctaagaagaagaagaagctctttgggaggaaacatccattgcatcacgttcttggaggaggcaaaggtacacatgagttaggaatggagaaattcgagaatttttgctgtcatatatctattttctttacagaaaaaaaaacgaggtacactaagtcttttgaaacatggattgacaaaataaaccatatattgctttgtgtagtttatgagctccttttgtttccttaacttttgttaatctataaggcgtgtaacagccacggatgacaataatggcatctaatattccttttgatttagccgccgatcttgtgctgtggaggaacaaacaggcatccgggagcatcttggcaggggtgactgtgatctggctgctgtttgagggcatcggctaccacctcctcaccttcctctgccacgcactgattgtgtttctcaccgtctggttcgtctggtctaatgttgcgtc

SEQ ID NO: 5891 - DNA, 455 bp, Zea mays
gtgatgctgctggcgctgtcaagcgtactggcgacgagccgttctggtgagtgtttatttaccttgtatataatataatcagtgtctactacgtactactagtacgtttaaaccgtgttgtctgtggcagtgacttcatgaaagtagcacggaggctcaccatagtcgagagcaccgaggggaggctgcagaaacgtctcgtcgagtacatggcttgattgcatgactgttcgataaggcactctgaagcttgaggaagactgaagcttggagcgaagtaactgctatgttttcgtttgcgtttgtctgccgtgaagcggaatcgcgatgtctgtctcgtcgtgtgaaagaaactcgtgtatcggatgttcgtctgtcgtcgtgacttagaactctgtcgtggtcagttgtcttgcgcttgcgcttgggtcgaagttgataaatggcctctttgt

SEQ ID NO: 5892 - DNA, 730 bp, Zea mays
tacttcgtcggtatcttcacttcaccgacggcgacgagcacgaactcgaacctttttttttcccaaaaattagccccctccctgccctgcggaccctgccccagtctgcactctacgatggcggcgcctccggccacggctcccgcggcctcccggtgtctctccggtgccaagtcgtgctgggctgctgagcggagctccagctcgtttgccgtctcggcgccttctactggcctccggcaaagtaggagccgcgtcctcagcgtccgtgccaaggtgagcgtcggtcgagactatcgtttccgcagatttgactactctaccaagtgccagtgacttcctttgctagttttgactgtgtggattgtggtgctttaaaaaaaatccttgcattgcagtcgtctcatccaaatcccatgctaccatggaattctgaaaccgattttttgaaacccctatgggattgagctgttctgtgttcttccacgcaggttgccactggcgtgcagagagccagcactgtggatgatggaggtgggttgtcttttattagttgttcagacatcaagttgtgtattcggcacgtggagtgtgcacctgggatcttgtagcacggttcatcgattatgtaccttacaatttaagagctctgttatttctggttttaccatttttgaaatgtccatgcagcgaaaaggccgtggaagctcagtgatgctcgtcttgtctg

SEQ ID NO: 5893 - DNA, 1002 bp, Zea mays
  misc_feature (376)..(376): n is a, c, g, or t
  misc_feature (776)..(777): n is a, c, g, or t
  misc_feature (782)..(783): n is a, c, g, or t
  misc_feature (787)..(795): n is a, c, g, or t
  misc_feature (797)..(799): n is a, c, g, or t
  misc_feature (802)..(802): n is a, c, g, or t
  misc_feature (806)..(806): n is a, c, g, or t
  misc_feature (813)..(816): n is a, c, g, or t
  misc_feature (820)..(822): n is a, c, g, or t
  misc_feature (825)..(835): n is a, c, g, or t
  misc_feature (838)..(839): n is a, c, g, or t
  misc_feature (842)..(847): n is a, c, g, or t
  misc_feature (854)..(860): n is a, c, g, or t
  misc_feature (862)..(864): n is a, c, g, or t
  misc_feature (866)..(879): n is a, c, g, or t
  misc_feature (881)..(885): n is a, c, g, or t
  misc_feature (889)..(902): n is a, c, g, or t
  misc_feature (904)..(917): n is a, c, g, or t
  misc_feature (923)..(933): n is a, c, g, or t
  misc_feature (935)..(938): n is a, c, g, or t
  misc_feature (943)..(949): n is a, c, g, or t
  misc_feature (963)..(966): n is a, c, g, or t
  misc_feature (970)..(977): n is a, c, g, or t
  misc_feature (979)..(986): n is a, c, g, or t
  misc_feature (988)..(990): n is a, c, g, or t
  misc_feature (992)..(998): n is a, c, g, or t
ctatgacttgcctgtgcaaattcctattcaggtcctccagcgccgtatgattgcacgtggaggtgaacatattgctcaaatcaaggttcgctggtccgggatggcacctgaattggccacctgggaggatgcaactgcactgcaagcaaaatttccagcagctccagcttggggacaagctgggtttcaagagcgggggaatgttagcaacggcgttgatacagtgctgccgacgaaggagaacgccctggaaggaagcaagatgaccaaggaaagctgtggagcacggaagcgtattccaaattcgaaatactatgggccacgatgggccgtgtaagcagccgtgggctggatgtaatagttgttgctaagacangcatttaaagaagctcggaggtgttttgatgactgccagcgtgttaggggcttggtaagccaatactatctttggtttaaattcctgtggctatgcctttgtttgtccaccctttcatggcgtcaaacagtatgttacatagcaacaactccattggttagatctgttgcagtcttgtaactcttgttatggtaaaacctgttagtcctgtgaccagtgaactcatgcttctatgttatttgcaacttccaggttgatgagtggtacgagcagccagcagccacaattgtcgattgggtaacgatagatggacagagcgtgggtgcctggatcaacctcgtgaagcaactccacatggagatctccagacggacgctggcaatgtcatctgtaggagacnnctganncaannnnnnnnntnnnttntaantctcccnnnncttnnnctnnnnnnnnnnnttnnttnnnnnntcctccnnnnnnncnnntnnnnnnnnnnnnnncnnnnnctcnnnnnnnnnnnnnntnnnnnnnnnnnnnncttccnnnnnnnnnnntnnnncttcnnnnnnnccccctctcccaannnncctnnnnnnnncnnnnnnnncnnntnnnnnnnccct

SEQ ID NO: 5894 - DNA, 389 bp, Zea mays
agtgcagttccgaccaaaactatgtgtctcagggtttcagcttcgatgcatctcctatatacagctcctgcttagcataaacgtaccagaataaataggtcctcaaacctgtaggcattcttacaagtgcatcatttcctaatactagtgcctccaattggatccatggcacctgaagatgcaacatctgctgatacaatcagttgagatgttctaccgaggcaatgccaatcttgctttccgaacaaaatcaaaccaaagaggatacatcgcatcgctgtggccatcaaaccgccgcttacccgacctgagcactgaacgcgacacgctgaggcatctatctccagggtccccaaccttcccgacatctccatcttccacatccacat

SEQ ID NO: 5895 - DNA, 1274 bp, Zea mays
  misc_feature (576)..(578): n is a, c, g, or t
  misc_feature (610)..(612): n is a, c, g, or t
  misc_feature (617)..(620): n is a, c, g, or t
  misc_feature (622)..(622): n is a, c, g, or t
  misc_feature (627)..(653): n is a, c, g, or t
  misc_feature (656)..(666): n is a, c, g, or t
  misc_feature (669)..(685): n is a, c, g, or t
  misc_feature (691)..(699): n is a, c, g, or t
  misc_feature (704)..(713): n is a, c, g, or t
  misc_feature (718)..(719): n is a, c, g, or t
  misc_feature (721)..(731): n is a, c, g, or t
  misc_feature (733)..(733): n is a, c, g, or t
  misc_feature (735)..(740): n is a, c, g, or t
  misc_feature (742)..(745): n is a, c, g, or t
  misc_feature (747)..(749): n is a, c, g, or t
  misc_feature (752)..(758): n is a, c, g, or t
  misc_feature (760)..(762): n is a, c, g, or t
  misc_feature (769)..(779): n is a, c, g, or t
  misc_feature (781)..(790): n is a, c, g, or t
  misc_feature (797)..(802): n is a, c, g, or t
  misc_feature (804)..(826): n is a, c, g, or t
  misc_feature (838)..(838): n is a, c, g, or t
  misc_feature (846)..(857): n is a, c, g, or t
  misc_feature (859)..(868): n is a, c, g, or t
  misc_feature (870)..(878): n is a, c, g, or t
  misc_feature (880)..(880): n is a, c, g, or t
  misc_feature (883)..(883): n is a, c, g, or t
  misc_feature (889)..(892): n is a, c, g, or t
  misc_feature (894)..(896): n is a, c, g, or t
  misc_feature (899)..(914): n is a, c, g, or t
  misc_feature (917)..(920): n is a, c, g, or t
  misc_feature (922)..(939): n is a, c, g, or t
  misc_feature (941)..(942): n is a, c, g, or t
  misc_feature (945)..(948): n is a, c, g, or t
  misc_feature (951)..(955): n is a, c, g, or t
  misc_feature (957)..(957): n is a, c, g, or t
  misc_feature (964)..(971): n is a, c, g, or t
  misc_feature (975)..(978): n is a, c, g, or t
  misc_feature (982)..(983): n is a, c, g, or t
  misc_feature (991)..(996): n is a, c, g, or t
  misc_feature (998)..(1005): n is a, c, g, or t
  misc_feature (1015)..(1019): n is a, c, g, or t
  misc_feature (1022)..(1037): n is a, c, g, or t
  misc_feature (1040)..(1046): n is a, c, g, or t
  misc_feature (1050)..(1052): n is a, c, g, or t
  misc_feature (1058)..(1062): n is a, c, g, or t
  misc_feature (1068)..(1068): n is a, c, g, or t
  misc_feature (1070)..(1078): n is a, c, g, or t
  misc_feature (1080)..(1081): n is a, c, g, or t
  misc_feature (1083)..(1101): n is a, c, g, or t
  misc_feature (1103)..(1104): n is a, c, g, or t
  misc_feature (1107)..(1110): n is a, c, g, or t
  misc_feature (1117)..(1124): n is a, c, g, or t
  misc_feature (1126)..(1128): n is a, c, g, or t
  misc_feature (1130)..(1131): n is a, c, g, or t
  misc_feature (1134)..(1136): n is a, c, g, or t
  misc_feature (1138)..(1140): n is a, c, g, or t
  misc_feature (1142)..(1147): n is a, c, g, or t
  misc_feature (1152)..(1156): n is a, c, g, or t
  misc_feature (1158)..(1162): n is a, c, g, or t
  misc_feature (1164)..(1164): n is a, c, g, or t
  misc_feature (1168)..(1187): n is a, c, g, or t
  misc_feature (1190)..(1194): n is a, c, g, or t
  misc_feature (1198)..(1202): n is a, c, g, or t
  misc_feature (1206)..(1216): n is a, c, g, or t
  misc_feature (1220)..(1220): n is a, c, g, or t
  misc_feature (1222)..(1225): n is a, c, g, or t
  misc_feature (1231)..(1237): n is a, c, g, or t
  misc_feature (1251)..(1252): n is a, c, g, or t
  misc_feature (1257)..(1266): n is a, c, g, or t
  misc_feature (1269)..(1269): n is a, c, g, or t
tagaataaattgatctttatttttgtttcaagcaatgatgtacaggtgggtggtcttgaggaagcgtatttagcagccaagtccttacttcaagtaatgaggggaaaacaatctactgtggtggtgctggaaatggctcgacaagtttttttaaccttcattcttcacaaaaattctcagtgtgacgatgattctgactcactcttgatattgggtacttaaggctgcaaagatatgtaacaacatggcaatggcaatcagcatgcttggggctccgaggcctttgctcttggccagaaccttgggatcaaagcaaccactgtcacagacattttcaaatgttcaagcgctcgctggtggagtaggtattctctcctttgttcatcttattgtggtctaagttgctgcgacattgggattttcttcctaagaaattggaagggtaacaaccattgtatggatagtaattttttagcttcggcttgcatgttgcatcatctgaaatttttaattggttttcttttctgttggtttcaatagcgatacatataatccagttcctggagttatggaagnnntaccatcatcaaggaactatagtggtggtttnnnttccnnnntnatggnnnnnnnnnnnnnnnnnnnnnnnnnnnttnnnnnnnnnnnctnnnnnnnnnnnnnnnnncttccnnnnnnnnnttttnnnnnnnnnnccctnncnnnnnnnnnnntncnnnnnncnnnncnnntcnnnnnnncnnntcttctnnnnnnnnnnncnnnnnnnnnnttcatcnnnnnncnnnnnnnnnnnnnnnnnnnnnnncccccctttccnttcacctnnnnnnnnnnnntnnnnnnnnnntnnnnnnnnncncantccctnnnncnnnccnnnnnnnnnnnnnnnnccnnnntnnnnnnnnnnnnnnnnnntnnccnnnnccnnnnntnaacttcnnnnnnnntccnnnncccnntcttccannnnnnannnnnnnnaaccttctcnnnnnttnnnnnnnnnnnnnnnnacnnnnnnnttannnatatannnnnatactntnnnnnnnnncnntnnnnnnnnnnnnnnnnnnntnntcnnnntccttcnnnnnnnntnnncnnccnnntnnntnnnnnntctcnnnnncnnnnntntttnnnnnnnnnnnnnnnnnnnnttnnnnntttnnnnnctcnnnnnnnnnnnctcncnnnnattctnnnnnnnttttctattctatnncttcnnnnnnnnnnttnatctc

SEQ ID NO: 5896 - DNA, 351 bp, Zea mays
agttccgaggtgcaaccgaaaattgaggctttcttcaacgaagtgattgagccacagtttgcttcaaacaattatacgtttgatgtgtatgtgaggacagatgggcgagtcaagctcatagatttcaatccatggggtggttataccttgccgctgctgtttacttgggaggagcttgaggagaaggggagagggtctgagctggagtttcgggtggtaatgcagcagggtgcagtgaggccaggattgatgacagctgtgccatatgatatgctggattggggtgaggggagtggctgggatgtttttctgaagaaggctgacgaggagcttgacagacagatatgaact

SEQ ID NO: 5897 - DNA, 397 bp, Zea mays
aggatcggcgtcgacgccgccagggtctcccagaggctgcacgcgctgctgcttgctccgacgatcctcgtctgatcgagctgagagagacctccagaccacggcctatgcaaccaccgtgctaatggcgtagtagtactctagtatagtactagtactgtatgagttggtagtcaaagctgcagcctgcagcagagagcggtgcagtagcggggaactataagccgccggcgcgcgcattcttgctggtttctttgcagttgtgcatatttaggagcgagcaaagtaaacacaggctgcctttttgtttttgtttttgtctctcccacctcttcgaaccagtagactactactgctactacttgtgtctatcagtctatgctcggatccagtgtta

SEQ ID NO: 5898 - DNA, 681 bp, Zea mays
gggatttcttatggctaggatgtcggtttgttcgcggggtttaaatgaggataaataaaagggcttccctttagtggggggttttgcgagatttatttgccggcgatttgactggatttgatactgttcccgagtatggaggatgcgaacagaggcctaatctgctgtttgatgttgttcttgtgcagaggtacatgcagctgcacaacgaagtagagctgtcggccctcggcatgggtaaatctcttgcctcctgaagcctttccctttttatctgttataaaacgcattttcccgttcattttatctcctcaggactgggtttcgtgtgttccttttctaattttccctgaataaatcaatatagcctcccaaggccacggttcaaacatagagagtaacttttgattttaaattagttgtggttagcttctctgatagaacatggaagatggttcctgacaatcgtcggattaattgtggggggttgttgtttatctgaaactaggccaagtgttttagagttcaggattttccagtgtatgtgatcacaaaaagctagtgccctcatggcttgctgatgagggttgtggtttgaagtcttgccctccgttgctgcaatctgccatttctactttggctacaacttgctttagacatcatgtgcagcatgctgccatc

SEQ ID NO: 5899 - DNA, 409 bp, Zea mays
tccctattggctttgagggctatgagaagcgcctcgagatcacgttctctgacgcgcctgtctttgaggacccttgtggtcgtggcctgcgcgccctctcccgtgagcagatcgactcgtttctggatctcgcacggtgcaccatagtgtcacagctctccaacgagagcttcgactcatatgttctgtccgagtccagcctctttgtgtatccccacaaggttgttctcaagacctgtgggacgacgaagctgctgctcgccattcctcgcatccttgagcttgctgcagggctgtcactgcctcttctttcagcgaagtactctcgtgggaccttcatcttccccggcgcgcagcccgcgccacaccgcagcttctcggaggaggtatctgtgctgaacgctttctt

SEQ ID NO: 5900 - DNA, 364 bp, Zea mays
ccccgcccccgccgccgccgtcgagaagaaggaagagacccaagaagaggagaagaaagaagacacccctgcaccgcccgccgccgagactgctcctcctgctgatgcagcagctgctacagagcagcccgctgcggaggccgcggcagaagctgaggctccacctgcacctgccgtggcggagccggccaaggccgaggaggagacacccaaggcctagctagctagggttcagcaggttcatcttcttgcgcttgctgcccctagctagctagctggtgtaccgtgctctttaatcacgtcaccatccatattgttgttgcatatatatgcacacaatgtttttgttgctccagatgttatt

SEQ ID NO: 5901 - DNA, 940 bp, Zea mays
  misc_feature (684)..(684): n is a, c, g, or t
  misc_feature (901)..(902): n is a, c, g, or t
actttattgggtcttctactactggtctgcacaccgaagtgcaggtaacaagttgactgttagctacatgaattactttgttttgttctcgtttgttctttatcctcccatttgtaccatcattaatcaggacttgcttatggatcttgtaatatttctcgtttcactttttgttactagaaacatgacctagtttagttctagatctgttgttacaagcgattaacaaccttattttagcactcctgggtattgactgaggaataatcgaaccttttaccacttgtccaaggtaaaaaagagagcataaatatgactggtttgattgtaaatggtgattgaagaaattagtgatatgtaatgcatataccatttgatgcatttttctacgtcaagatgaataaggtgaattcaacttatgatttggatacttttttggcaacaggtgctgagaacttaataccaattgaattggccataaagattgcaagaaagattaaggcaaaggaaagatttgcagcatacattgttataccgatgtggcctgaagggaatccgacaactgccgctatgcaggaaatcctctattggcaggttcgctcatcatcatggtcgcattttcattgaaaatattctatgcttgtttttcctcccttacgttttttccattgtttccattttctnttcaaggggcataccatgtccatgatgtacaagattgtcgcagatgctctacgaaaggagggtttacatgaaaggcatccacaggagtacctgaacttctattgccttggcaaacgtgaagtctcgaatgaagttccgacgacaggcaattctaatgagaactctgcagtggtaagtacacataccgtgttctagaatgagttgctcaaatgcgctnntttagatctgtttcgtgaggataggctgtcctctctct

SEQ ID NO: 5902 - DNA, 399 bp, Zea mays
tcaggagatttagcagtggcagacctgagatgccttggcgatgacccctgggtgtatatgtcatcaggaccacgagggagcgcaggaggctatggcagtgttctgtgttgtcaccgctctcaagtttttgtcagccgaaaggatggattggaggtttggtcccgactggaagagcaccgccacaacacaggcgaattgacagagcaatcaggagtaaaggaaagacccaaaaatgaaggaattgatggcagattttataggagttgctatgtggacacagaaaaggatgctaagcgtgggatgatacagatgattgaagggggtggagaccgcttgtttgtgacaagagaagagatgcaaggtgtggaagtgtgggaaacctcccaccttgctggttct

SEQ ID NO: 5903 - DNA, 387 bp, Zea mays
cttggaccatagtgtgtggtggaggtggtaaatcagggcaatcagataaatactgctgcatgatagttgatgagcatgagattcagcatttctattggaatgtcatgcaggcagtcagcaccgtggccagtcatgatgatgactacaggaaagctttgagaggaccgctctacgtcaggatccgtgagtaccaggattctgatgacaaggcgaaggtggcagcaacagaggaaaatgctaccgaggcgccccctgataatgccactacacaaaatcgtttgtcactaacaaataccgtatcgaatagcgagattgtggaggagtccgaacagaacacatccgtcactgtggtggatagtcttccaactagccaacaaccctatgtat

SEQ ID NO: 5904 - DNA, 830 bp, Zea mays
gcatatggtcaagtacaagtatgtcccattcagctttggaaagcaggtgagacctctttgtttctgacctgaaatttacacaaatcatgctttgtagcagagtttctcaaagttgataccaaatggtttttatttcctgtggtttctactttcgattgtgtctaagtctagtcaatgataactttgtgttcattcagcgtggctggatattaattaggttcgccacgggtttattttgctgttacaaacttatgtgattttgttgctttcaagtaatgaattctggcttgtccgtagcggggaaaaatataggaacttgtataggagcttgggaatgtttgtattttattcgtttattatctgcttggtactatacagtccattaaacaccaccatgtaatggcaagtcttttttctattctgaggctaattgttttacatcatgcccattgacaatgcatgctccctagaattgactgagaatatggaagtcttgccctgcatctgcaatttggtcatcatatgtagattactaaactctggtcgcaattccaatgcagaggtatggcggaaagaaacgccctggagccagtgcatcaaaagagtaaagaccggagggtcttgtacctcaaagagcaaatgcctgtgttatctgtgaggcattttgctggcatcatggtattttgagtaccagctactgatagtgaatgcacaccatattcactagtggagtctgcagagaagctaaccagacttttgcattggttaatgattcctgtttcacaagtcggtagtttatgtacaatgacatggaacatagctagtaaatc

SEQ ID NO: 5905 - DNA, 848 bp, Zea mays
  misc_feature (785)..(786): n is a, c, g, or t
  misc_feature (804)..(805): n is a, c, g, or t
  misc_feature (819)..(821): n is a, c, g, or t
  misc_feature (834)..(836): n is a, c, g, or t
tggcttctctcccagccgcaaccgctgccgcctctatctctcccttccctcttctctctcccctcaactctcctcattcttcgcaggctgagcagcaaccgccccaatctgcagttcaagaaccgcccacgcagaacccctccgccctccgctccttccaacttgctctctacctgcaccagcctcgcccacccttcgctcgccgccgccatggggaggggaaagttcaagggaaagcccaccggccgccacagcgtctccacaccagaggagatcggtaacgacgcgcccgcccgccccatggtcccatttataggtcgaattcgatttcatatctggagcgtgccacagcgagcctagacgactgcttgatctgatgatttcaatgtgagctagttctggaccgggtttgcgtgatcgagcagaactcaaaccatttatttagtagcttgtcgcgagttgtcatttaagttcctggttttaagtctgtgctacgaggtttccatgggattcgttcgatgcttggaggaacgatgatttgttcatctagttgttcgatttagaggctcaatgataaagctctttagaggctagatacaggaaataaatgctacacttagctttcttttttcattaatttctacctgtgtatatatgtctaaataattagcacactatatttggcttgtttctgataactttatcctctaaataattgcagctgctggtacttcaggtcgcccctcgcacctttatgaaggtctgtaatatccattcatttagtnntcatccacattgatgagnnctacttttattccnnntgaccctttgccnnncctatgattcaa

SEQ ID NO: 5906 - DNA, 502 bp, Zea mays
  misc_feature (72)..(72): n is a, c, g, or t
  misc_feature (75)..(75): n is a, c, g, or t
aaactagcattgttctacaaactgatggacaaatcatgccttcaaatctaattgttcaatacacaatacttnatntttgaatatataagacttctaagctgttggagcttaagggcatccttctcttccaattccagtcttgttgctcagagtaaaagcttctacaaagcagtaaaagaagtattagtatttgtctatttaaacatgtagagtatacacatgtgtgacagctcaaaaatatcacctgcatcccttcctgcatctcttgaaggcaactccaaaatgtttcaggttggtcagcattagatgcatctatgaaacaaaagtgtaattatatcattatatgtacgtagcataatttttggaaaagaaagaacaagtatgaattgtgcaaagcaattatacctagatacttgcgtcgcatccaatcttgtgagcacataagcgcctccaagatctctggagtaagtcggctgcggtgctcgctaagaacacgaccact

SEQ ID NO: 5907 - DNA, 381 bp, Zea mays
gccgatccaaggagatcttcggaaatgaagcggatgataaatgccctgtgattcactcacaggcattctcccttgggacttttgatggtacttattagaaagatctgctgccttttgttgtatctttatcccataagaactgtgagaccaaatcttttcgatgcccatggtatggtagcaaaaattagactttaacttatccgatccaataattgtccgttgagcttattttttcttcggaatgtgattccaatttagcccttaattgggttgccaatccaactgctcgattgagcagcgatgctggaattttactcctctagggatccgtagtcttgcacttatgcggcattacgactccaacaccctcatacagaaaaa

SEQ ID NO: 5908 - DNA, 460 bp, Zea mays
gcgattgaaaagcttaaaaataatgagtgcacacctgcggacctatgctactcattgcaggtacttgcatgctcttaaacttttcccccttgtggataataattggttatgctttcttgacagtgacactgatgaaagtcctaatttctcaggaaactatctttgccatgcttgtcgaaattactgaacgtgccatggcacactgtgattcaaaggacgttcttattgttggtggcgtcggttgcaacgaacgtttacaggagatgatgaagattatgtgctcagaaagagggggtaggctgtttgcaactgatgaccgctattgtatagacaatggggcaatgattgcatatactggtttactggcgtatgcacatggcatgaccactccccttgaggagtcgacatttacacaaagattccgaactgatgaagttcatgcaatttggagagagaagga

SEQ ID NO: 5909 - DNA, 351 bp, Zea mays
ttttttatccctagagtggcgccaagagttgaattaggtgtaagagcaaatttgagcgtggattgtgggggtatggcggcctacgcaagttcaccggactgatttcgtcgccgtccatgaatggggacccggttgtctgaaggagaaagaaagggggatctctttgtaaatgtcagtgactaagaaaacagtgccttggattagccttcagttattcaaatgcccagggagttctgtgaaaaagggctcgcgcgggcgtggacgcgggcgcgttcccctgttcgcaggctgactcgggccagatttggcccgtcactattcattgtttcttcttttctttttactgccagc

SEQ ID NO: 5910 - DNA, 932 bp, Zea mays
ttgaggagcaactgagcaggtgaaaatcttgattctttaatgctgcttacatgtgaggtgtgaatatatatcatttgtgatttctgagtcgttcacagtatcttttaatcttgcataaaaaatatgtatttcgaacatctctcataagaatttacatgatttgcacgtgctatataataaactgtccgcaatattttagaactttgttattgaatctgcatttgctaaatgcagaaatggaatgccttgtatgatattctgcaagaacataagttgtctttgcaaattgcaagtttgtgttctgaaaatacttgtctgctgtatctgctgtaacttactctcggtgacaggttatgaaaaacatgggcgagatattgaaagctagtggtgctaactattcttcagttgtgaagacaacgatcatgtaagtaaatgttctttatgttttgctcaagatattttgatgtcttcaggtgtgattctattattttacctgcaggttggctgatctgcaggatttcaataaagtaaacgagatctatggcaaatgtaagtttgagctgtgttgctccacctgttcctaatggtgtaattccattctttaataacagagctgtgacagcgttttaccatcatcagattctggatgtcacatattgataatatttgttttcccttcctctgaagatattttcgttcttgctgcagatttcccggcgccagcacctgcacgatcaacctaccaagtggcggcgctgccactgaatgcccggattgagattgagtgcatcgctgctctctaatcagatcatccaaccactcattaaatcatcaataagcacccaggaatttgtggtagaggtacctgtaccagttcagtgtctgaaaactgcgggtaacaaacctttgtgtcccggataagtgatgtgtgt

SEQ ID NO: 5911 - DNA, 564 bp, Zea mays
  misc_feature (557)..(559): n is a, c, g, or t
ccttttcttgtgcttggcagcctgatcagatgccaatgcgatcccatatctccccatctctgacagggaaaataaaatctctccgcgtctgctgcactaccggctggtggttgtgcacttgtgctcgccagcgcggttgaatcccatctcacctcccctcatctgccgtcgtccggtgactgacaggacgaggctccttttccgcaccagcagcgccctctccacttgatgatggcctggcctgctagctcgagaagaagaaatgggcaagcagtggcaatgagatggatgttcttggtttagcagttcttggtcgttgcctgaatcctgcacattttactactacagttgtgagccagaatcgcacagatctgcctgaattcttcttctgaatatccacagcaatgcgaaattggacctgcggaaaaggaatgggcaactgattggtacagtactcactagacaataataatcctgaccaatatgtaaccatatccgcacagaagatgccagggttagattttttttgttgttgttgcaggcccatgaacagtccnnngggcg

SEQ ID NO: 5912 - DNA, 194 bp, Zea mays
gagatggggccaacaacagttcttcattagggggaagttaataagtttacaaaccaactcttcgcgagttggtgcttccctacttctactctacattactactactactaaactacactatactactctacattactactacattattctaactatactaatatctaaagaccagtggcgtttagccactggcc

SEQ ID NO: 5913 - DNA, 384 bp, Zea mays
tcttgcgtgcaggtgcagcccgccaatagctgccgtacgcttagactggtttatctgtttgtggcgcaggtaaggttcacggatcgcttgcccgcgcggggaaggtgcgtgggcagacgcccaaggtggcgaagcaggacaagaagaagaagccccgcggccgcgcgtacaagcgcatgcagtacaaccgccgcttcgtcaccgccgtcgtcggattcggcaagaaacgcggccccaactcctcggagaagtagatatagccatgtctttgtgttttgttcccccactagtttccttgtactgatggcaagttgctgaagacttatatgctattattatctgtatcgatgtgttactgcaacactatgaaatatggtatgcatc

SEQ ID NO: 5914 - DNA, 835 bp, Zea mays
gtctcaatcattctacaggtccaagagaaaaaacttgtggaaaattaactggcggttttgataagacagcacaacagatttatttggacagagacctatccaatgctcttaacagcagtgaatcaatacgttgtgagacgagatcaatttcctcttctgaaccgacaactccaaagtctttaaaaggcaattatacttcagagtctggtgaatcaacagatattacaataggagctcttcccatgcagaaaagaagattgcaggatttagttcgaactgatgatgccagtgaaactatttctgggcgatcatcaccttgtatgactctcatctttagatcttgcatcacttctttattttcccttaataatgaaactgtgtgatgaagggcaggcctaatgcagcggtgagagctgtttcattgagtcaccagcctcttcgcatttgcgagggaaagtttgcctcggtttatcctttccttagatgccactcatgtaggagcctccaacactgagtctgcccttttttagtgaaagcttgtgatgaagggtaggcctggtgcagtggtgagagctatctcattgagtcaccaggttaggtttgtcccttccctagactctctcctgcgggagcctcccgcattgggtctgcccttttaataaaacccttttaatgaaaccttgtgaaaagaaagtgacactgtttgcagcaagcatcatatcgtctaacatgatgttgtactcaaaacattgcaggttctgagtcatcgacaactgaattaattgctggacatagtacagattcatctattgaagggaaccatggctgtcaaggg

SEQ ID NO: 5915 - DNA, 367 bp, Zea mays
  misc_feature (346)..(346): n is a, c, g, or t
  misc_feature (348)..(350): n is a, c, g, or t
  misc_feature (352)..(354): n is a, c, g, or t
tgcgctgaatcgcaaataattttcatggacctcacctaacgaaaggaacagtggagctgtaccgttaccgtggactgacataaagtccagtcacagtcaatgttgtatttcggtgctgctactatgatgatgatgagcttcaggctctagattttttttttgtctacttcagatgctgtgcttcaagcaaagtcgagtgccaaatggccaagggaatagacaacaaaacgtacacgatttgagatgaacgtgccagccgccgtgcaggaaacgacgaagctgcaggcataactgtgcttgtctgcaaatgttttgcatcgtcttttagcataaaaataactcatangnnngnnnccaaccaggctat

SEQ ID NO: 5916 - DNA, 491 bp, Zea mays
  misc_feature (358)..(362): n is a, c, g, or t
  misc_feature (379)..(391): n is a, c, g, or t
  misc_feature (407)..(409): n is a, c, g, or t
  misc_feature (411)..(411): n is a, c, g, or t
  misc_feature (424)..(433): n is a, c, g, or t
  misc_feature (436)..(437): n is a, c, g, or t
  misc_feature (441)..(449): n is a, c, g, or t
  misc_feature (457)..(458): n is a, c, g, or t
  misc_feature (462)..(470): n is a, c, g, or t
  misc_feature (473)..(477): n is a, c, g, or t
  misc_feature (479)..(488): n is a, c, g, or t
aacagtgcagctaagaaggatgggtcctgtgattgcaactccagctttgagtgtaatatctgtcttgacccagctaaagagcctgtggttacaccctgcggtcacctcttctgttggccatgcttgtaccagtggcttcatgcacattcactccactctgagtgccctgtatgcaagggtgaggtgctagaagtgaatgtcactccgatatatggaagaggcggtgaagaaggggattccaccaaccctgacttgccacccaggccacgagcaaacagaagggagagcctgagtcaacagctgcaaatggcagacacaagaggaattgcaacagtggtgaggcagttgatacaaaaannnnntgcctatcctacctgcnnnnnnnnnnnnnttttatctgcctctannncnatgacagatgccnnnnnnnnnntcnncctnnnnnnnnncccacaannctannnnnnnnnacnnnnnannnnnnnnnncat

SEQ ID NO: 5917 - DNA, 398 bp, Zea mays
cgtcgcctagggcatacccagctcaccttggacaacaatggtgccttattgcttaggaaccacctacatgtccatgcgaacccaacactcaccttgatacctattcgtctctgaaaccatgacattcatcttattgatgcaatatgcgttgaccttgcttgtcatatcacctacccttttcaaattagaatcgaaaatctgtctggatttccttcaatgcatatttgaggtgtcagaactcaggaacttgcaaataaacctaaaaatatcaattttctgaatataaattttatgctgtcattgcttttctattaagatatggtactgtgtccctacctcgttcatgccctatgatatgcaggttccatccatcttgtgtggctatgaccattgaaaaa

SEQ ID NO: 5918 - DNA, 1015 bp, Zea mays
  misc_feature (991)..(993): n is a, c, g, or t
tgtttcttctccttggactttggattttgtcggagtaattgaggtcatcgggtgcgcatttgggcttatggcgttctgctgctgcctccctgctcgcagcagggattggaagcttcggagtcggtgcggagagcaatggagcttcgtctagttttaggttagtgtgctcagattcttaaaattacatcttcatgttgttactttttatactctcggaaatatgtttattaactcgctagaaatgggtacagctgttttttttatatattcagctaatgttattcttgggactggaattggaggcttggatgcttttttgggcttggcgtattgtcacacatgggctagcaaatgggaaaaaaaagttgtgaatttggttttttgaccttgtaaagagttgcctctcaggctctgggttgaattgaactggcatcagaatcagccaccgggtatttggatcttttttaactgttgtcataatgtcatgcttctttttgtactggatccagcagtaaagctttggagtaaaagccatatagtgaaggatggctaggtcaaaaagaaaaccccgtttcaacttcaattctgatttctgaagcacaattgaccgttcagaaagtaaaaaataattaggtgaataaaaattaatcaagtgaattatttttcatactgccatctatagaaaatgtgtcttcttggcttgccaatatgactaatccttctgtagaaattccaggaccaggagtctgctgcagattggagacagaaacgaagatggcctatttcatctgccacatacacgggctctcacgcacaagagcagatctcatagaaaagttccaacacccgcaccagcaccagagtccgctccagcaccctcaccatccatgtctccaccggacagctcaccgtctccgtcaccacatggttcacacccaatgccacgccaatcaacttcacatcgtcatccatccataacacctccacattnnncaggcctgggcctaggcaagat

SEQ ID NO: 5919 - DNA, 530 bp, Zea mays
gggtttctctggtgggaaagaccctggccgtcatgggcttcgggaaggttgggtcagaggtagcgaggcgagcgaaagggcttgggatgcacgtgatagctcatgatccctacgcccctgccgaccgggcccgtgccctcggggtagagctggtttctttcgacgaggccatcgcaagagccgacttcatctccctccacatgccgctgataccgacgacgtccaagatcttcaacgacgagtccttcgcaaagatgaagaatggtgtccggatcatcaacgtggccaggggtggagtgatcgacgaagacgctctggtcagggcgcttgactccggcaaagttgctcaggtgggtgatcacaacttcgttcgattcaagtgctatcatcacacccgattctttaatgtgagtacgtatatggatgtgtctctgaaagctgagtttttttcatgcatgcatggccaatgtggagcaggcggctcttgatgtcttcaccgtggagcccccgcccaaggacagcaagctggt

SEQ ID NO: 5920 - DNA, 369 bp, Zea mays
  misc_feature (362)..(364): n is a, c, g, or t
tggcgttgagcggcagcactgcattgccgtctctataatcgccttgaattgtatcaacggagattgcgagcagcagttatcttgaacaggcaggacctggccctagaatgcagcctgttgcgtgtcgtgactttctttctattattcgtcaggcagtagctttgtatttaggtaggatcctgagataatacatgttatttctggtcgatatttattagttgcattgaactgtattctgggttgctcatcacttgtatgttaaattggaggaaaattgatgctatgagcttcaggtgaatctgtttcgtgcctgtgttctttcacccttctgatatcagtgtgtggcctgcaattgttgtctnnnactga

SEQ ID NO: 5921 - DNA, 410 bp, Zea mays
gagcggtggtgatgcagcactgcagcagcagcgactccaaccacaaaaaaggcaaaagatatgtatgccttgaatccagctgatgaacatctgaatgtatttttgaagcccttgaggtagccttgactactgtggccttcaggattggctgccctagactgcttggcagaaatggcactgtttgtagttttcttctggtgctcaacatcatcagtcttgagatcaagacgtcggccactgttatctgtaaaccgcatggtctggttgatggatacggaactacttgtggccatcctattaattccaacctgcattttaatcttgccagctgctagtgaaatgttagcaggagatgtggttgctctgcggctttgtattgtaactccagtgtcagtatttcaattttgcca

SEQ ID NO: 5922 - DNA, 533 bp, Zea mays
ttactggacatgtcagagctcttatcaaagcttgctgatgtagaagccactgtttgagttctagttaaatgctcctcaccagtaacatccccattagaagacggtccagacttgtgatcgagtacatcattcttggatggcatattgggtggagcagtgggctcagaggagggattagtcgatgctgcaggagcccactgagagttttgaggtggttcaccatctacaacccatcctgggccgaaacttgtcccaggggggagtgcccttctgatacgatttgctgccacatcccagccaactgggcccaattttgatgcaaatcgtgccaagctcctagcatatgcatgtggctgctgaacccctacctggttcagacaataagaaacaaaaaaagaacaagaaatattagcacagcaagttccagcaaggatagattgaaatacgacggtggttgcaatgatcaactatagttaagttggtaggttttacaagtcagccaaaaattgaaatctgtagctcttgaccacaaa

SEQ ID NO: 5923 - DNA, 370 bp, Zea mays
tgggtgtgggtggggagtttgtcagctgggtggcgcgagcgtcaggcgatggcggaggcggaggagaaggcgagggtcgtggtggttggcggcggcgtcgccggctccctcctcgccaagactatgcagggccacgccgacgtcgtcctcctcgacccgtaaggcttcttcgcccgctccctccctgcgcctgctacccgtttgcggaaatcccgagccgaccggctgcttgctttctctgactgggtgccgggtgcgtgtgtcattgagtggctgtgcgtgcttccacggcccatgtgtgtgattcggtcgccttggctctccaccggtatggcggccccgaatcattgcggccctagagatataaaaa

SEQ ID NO: 5924 - DNA, 530 bp, Zea mays
ttcccgcaacccccttgtgtcccgacaacgctgggagcccattctcgcaccgcacttcgttaggttagtttagatcacatcattctcaggtttgttttaggcttttagtctacacctgtcgcctcaattaattcgctgtggagggggagattcggaggcattagcagaatcaaaatccatggtgttgtacgccgatctcgacgcgctccgggcgtcggcggccgacgtgcggatcgtcacgtcggacggccagaccatcgccgcacactcctacgttcttgtaagacacttgatctttccccttctgcctcggttagttctggccgactcagtcgcgcgccgtccccgtgtggttggttgctggtcatggattcatggttgttttggttttggaatcccaggcctcggcgtcgccggtgctggagaggatgatccacagggcgcgccgcgggtggggcgccgccgactgcacagtcgctgtcttcggcgtcccctccgacgccgtcctcgccttcctccacctactctac

SEQ ID NO: 5925 - DNA, 734 bp, Zea mays
tttgagaaaataaatctagagaacaccccagagactgagaaggagcaaaagatcagcgcaagctatcaaggcatatacaagcagttagttgaaacactaagatatttgggtgtgggagttgtggaaacagttggcaagccatttgatccttcggtaagtaatatttaccctcccgccgcctgttccattctcatggtctgtctctctccctaaaatgttgtatgcaaacaacatattggatccttttgaacgtgtaaaaagaattctgttccagtgttaatgagttgtttttatggcctggttcatactcaagagattgatcttagctttcacacagtttcctgcatctatgttgcagtacatgtctttcggtctaaataatatgggtatttgggagaaaaaaactaataacctactttcagtgcttacagctagatagtatggagatatgcatgagaatcaaatagcgttacatttatgttcatcatatatgcagcactatgggtctcattcttttgttttttttatgcaggtccatgaggccatctcacgagaagcatccatgcaattcaaggcagggattgtcatgcatgaagtccgcagagggttccatttgaaggagaggctgctaaggcctgctactgtgaaggtctctactggctctggcaaacaaagtgcaagctcataggcgggggacaaagatgctgctttgtgaatctgatcaaacgaccaac

SEQ ID NO: 5926 - DNA, 422 bp, Zea mays
gagagatgtcttgcctggccttacgtcgctttcccggcctgagatcacagaggacgtccagttgctcgaggggttagtccaggcttccgggggatcctgggagtcgagcttgactaggcgaggacgttgtggtgggcgtgctagaggcaggaaacctcggaaaactgtagtaaccgtaattgtagaggaggaggaagaggaggaggtagaggttagcccaccgccaaaacctgctggcactggggaattggaagccgatggcaggggtatgatcgggtggggcagaacaacaaggcggtgtcgcagagcgagatgtccgtcaggtaacagcatggctactgcgtcttgagtgggagggtatttcttggcagcaagcattggacctgattaggtactgggtggttcacaattgttgtattgaa

SEQ ID NO: 5927 - DNA, 403 bp, Zea mays
ccccgtgttctggttccttacaggcgagcacaggtcggtcttcgcagcgatggagtccaggggcgaggaaggctggtttcaactggacgccgtcgtggcggtggcgctgtcgtgcgtcttcgggctgctcatcagtttctttggcttcgcagccaggagagctgtatcggcaaccgcgttcaccgtgaccggggtcgtgaacaagttcctcaccgtggccatcaatgtcatgatctgggacaagcatgccagtgcgtatggttcggtctgcttgctgttcaccatcctcggtggggttctctaccagcaatcggttacggtgaaaggaaacggtgcgggcgtggcacagcgtgagctggtgcccgagcaacctgaggaggttgacgaggagaaacaaagctta

SEQ ID NO: 5928 - DNA, 416 bp, Zea mays
cccttttatcccgcgaaaccccaagcgccagaagcaattttcatctgacctaccttttcgtttttattcgatgcttcaacaggtcctggagcttgctgggaacgcagcgagggataacaagaagacccgcatcgtgccgcgtcacatccagctcgccgtgcgcaacgacgaggagctgaccaagctgcttggtggtgccaccatcgcgagcggcggcgttatgcccaacatccaccagcacctcctccccaagaaggctggctcgtccaaggcttccaccgtcgatgacgatgacaactgaagctgcccactggagaagaggcattcgctaccgtcttgtttcctaggtttagcacgcagttagtcagcatgtctttgagagagttcgatgtgtttgggaatgacaatagctcctt

SEQ ID NO: 5929 - DNA, 654 bp, Zea mays
gcagcagctgctgcagaggaaggggaagcccgtggctggcaagggagcggcctccatgaccgtgaaggcagagaaggtggtggtcgcggtaagggcagccacgagggagatctccaagacagccgtcatctgggcgctcacgcatgtcgtgcagcccggcggaagcatcatactcctcgtcgtcatcccggcacagagctctggtattgtttccgcttttggctttcctgtttgcttctgggcatcaatgagtgctcatgtgcacgtttgcttgtactactaatcatatccactttagttacaatgatcacgtaattccatggtttttattgcctagaggtgtcaatgtttctctccggttttccagtagttgcctgaaaaatatctgcacgcttcaccatttcaggcagaaaattctggggttttccactgtttgccggagactgtgcaagtggccataagtctatggtggatcagaaatgtgatttatcagagttgtgttctcaaatgttgaagaaattggatgtgtatgatattgacatggtttgacctggtgctaatgctcgtttacatgtttattaaaattatcatatacttgtgtgcttaatttatctgtgcttctgtagataaatgtaatgtataagcttgtttccg

SEQ ID NO: 5930 - DNA, 387 bp, Zea mays
gtgctcttcaccgaccgccgctcccgacccaccgtcaacctcttcgccgccaacgccaccgccttccacgaggcattcgtcgccgccatggccaagctcggcaggatcggcctcaagaccggcgccgacggcgagatacgccgcgtctgcaccgccgtcaactaagcctgccttggctgcttgctgcttgcgtgcgtgggtttcacttatttcacttcttctttctcttgtttatatacgtacgtttgtcggatgaattttgttggtagccatgagatgagatccttgctctgagctagcggacctgccccgattggatgatagagattgatccagatgttcttctagtagattctaattctttatggatgtttcccattgacacac

SEQ ID NO: 5931 - DNA, 366 bp, Zea mays
tagcgctaatttattattacaaccaccatgtccggtaatagtagattaaagagtgctaaggtctctgccctgtgcagagagagagagagggagggagtgaaggggggcctggacctaaccatggtagtgacactgagaagtaatgacatctacatgagtggggtgacccaagacaacaaaaattcatctatgggtccattgtgttaatgagttacacagcagtgcttggttactccaaagccttctttggagtccccaatgctgtgtttcgagggacagggggtagtgccaagtgctaaaaacaaacattggcactactctgaacctgtttctgattaggggcacaggctctccttagagccttga

SEQ ID NO: 5932 - DNA, 389 bp, Zea mays
ccttccgtggtgttggcgctcccttccatgatgttggcgctcccttccgtggtggcttcagtgacgtggtctgccgggcttgcaaccagattggccatacgagtcgtgattgcatggctggtgccttcatgatctgccacaactgtggcggccgtggccacatggcttatgagtgtccctctgtcagtatcatggaccggttcccccctcgccgtttctgaaggaaggacatccaagggctgttcagatggctgttgttttcagcccgttttgtcaagagcacctgttttgctttgctttatgtatttctaaacccgaatggattctagatatttcagattcataactcatcagcgatatttgtaattctggatatgttacccgactcc

SEQ ID NO: 5933 - DNA, 405 bp, Zea mays
cttcagggtacattcagcttctgtggaacatgagtgacacacgggggatccagaagtcagaaggcataccgaaatctgtcctttgatttaatgtggattatatagatgctcatcactcagccatgctgttgcatagtgctaaatatgatctagatctaggtcctggtctggataatgctctccacagcatctgctgtgcgtgtgacctgtgatcagttcagtcagttgatcaggttgtaaatgacacttgttcctctgtttccggcgcttactgcgctgtttcagacttaaccatggctattatgaagtgatgaagcgtgggggttttttgtctgtctactttatcgcatatgggggagctctttccaggatttatatgccatgtgtttgttgatgtacatgaaa

SEQ ID NO: 5934 - DNA, 495 bp, Zea mays
tgagtactgttcttctagatccaattcaggaactactgggattcccaattcaacaagcaagtacagagaggtacgctaagcaagccaagtcaataaattccttggattgttggaacagttgtatgatgtacctgtccttggatggattgttgcaggacaaaagggtgaactggcactcgactccctttactataaggctggatagagctttgaagaaaacttcggcatgaatgaattgtttctgtttattcagtcttgaatggattgtatcttcattcagcatggccttgcaatacacgacagtggatagtgcctatttctatctgtttagtctagtagtttacatgtgctaattcgactgcattacacgggggttcatatgtatgttaaatgtccatgctgccgggcgccggcgctgcaaagttgtggcttgtttgcgtctatcctgggcgtttgtttgctatgcacaacttgtgaccatttatcacgctcaaa

SEQ ID NO: 5935 - DNA, 376 bp, Zea mays
cctcaaccgtctcgatgagatgatcgtgttcaggcagcttaccaagctcgaggtcaaggagatagcggacatcatgctccaggaggtctttgacaggctgaaggccaaggacatcaatcttcaagtgaccgagaagttcaaggagcgggtggtggacgaaggctacaaccctagctatggtgcacgcccgctgaggcgagccatcatgaggctgctggaggacagccttgctgagaagatgctcgcaggggaggtaaaggagggcgactctgccatagtagatgtggactcggaggggaaggttgttgtgctcaatggtcagggcggcataccggagctctcaactccggcgatcaccgtttagctcgtacataaa

SEQ ID NO: 5936 - DNA, 386 bp, Zea mays
ctgcttgctgtctcagttttgttgagcggctctggagggttgcgtgttatgagcgtcgtccgtagtatggtttgtgacataaggtagctatgatgagcctagaacaaacataaacaaagtgcgggggaaacccttgcttttagtgactccattagtagtgctatgtggtttgtgacatggtttttaactatgatgttacgccgaatggtaatatattgaagaacgtgccgtggccctacacaacttagttattatttagactagatggagcacttaccaatgttggacttgttaaatctgggttttctgaatgtaaatgatactagtaattgtggttaagattaatctatggtaggcctggaataccaggactagggctttgaagg

SEQ ID NO: 5937 - DNA, 342 bp, Zea mays
gacgttcttcctcatcaagagcaaggaggtggtggggaagatcgtcggggcgaacccagacgaggtgaagaagctggtggatgcttccgccgagcccttggagactcagatagtcgtggagtagtagtcgtttcagactttttttttgaagagtcgttcgtgtcttccgaaactgctccgcgagactgtgcgaccgtgagtgcttcttggtcagggtctggatcgtcccggactgtccagtgtcgcccgtgcgtgtgcgtgtgacgtgtgtgtgtgatgggtttctgtcgctttgtagcagtagtagcacagccttgcctgttgggctggtagtggtactgc

SEQ ID NO: 5938 - DNA, 370 bp, Zea mays
ctaccaaccataccggcgatttccagtgccatgtaagcatttcagtcaacatctgtacagataggagtaaaagatacggtccaagcagcactccaaatggaacgaatggtagttgtggctgcagagtgcccctgcgagatgcaaaaaacagggcaaatggaaccacaaagcctactatggtagcagccagattccagaacctgtaggaaattggtatctgccttttcaggtcaaaaatactgttctcttgacggccgcatgcatcagccataaggaaaaacaacattgctcccatattaaaaatgaagtcaagtccgactagagatagaaggccagcgatgttgggaccatgaaacactgaagacaatgg

SEQ ID NO: 5939 - DNA, 380 bp, Zea mays
acgacgaccggagcgtagcctcgttgcttgatccaacgctgggtggagaccacagggaagacgagctagcggtcatcggcgaggtgatccgggcctgcatgcagagcgacccgaggcgaaggccgagcatgagggaggtcgccgccaggctgagggaggccgtgggtatctcgccggtcgctgcgacgccgaggctgtctccgctctggtgggccgagctggaggtcctttccgccgcggaagcaagctaataatagtgggcgagaggacagggcaggaacaggaacagggcaggatgatgtcgcgcaatctgaccagtttgttctcaagaaaagaaagccttgcagccctttgtgcatgctgtaaatgtgaatgtgaag

SEQ ID NO: 5940 - DNA, 176 bp, Zea mays
aattgaaaaactacaggctactacaacccaatgcttcctttcaggcacatatgtaacacatatataatcatctgaggtactctcttccgttccaaattataaaacgttttgggtatatctaaacacatatcttatatttagtatagcaaaggccatgaatttagaaaagccaaaaa

SEQ ID NO: 5941 - DNA, 179 bp, Zea mays
cttcactcggtgtagtggttgtggcaccccccctcccccaattcgccgcactgttcggtagctcctgatgaacagtgcaccatcacaatcactttctgtttttttttcttcttcttttcaacaacaaggtcatggcgcgagcacttgtgttgtgtttttacagttgggggggggggggg

SEQ ID NO: 5942 - DNA, 490 bp, Zea mays
ccttagccacaaagaacggtttacggaacaaggagatgccataacatttgagtcagaggtgaattttttcccagtacttaatgaattgaatgtacatacatattatttaaatctgctcaaactagtctgggacttgcatcttggcaaggcctgcattttttattgctatcgccacacatataactatatgcttgcttctgtggatagttaaacacaactgtagaagattttgggctttacttgtttttactggaattgtactgtccgagatgctcaagatttctaaggtcattggtggccccttctctttgttcaatctctttacaggtcgaccgagtctacgttagctccccaaatgtagtagcagttattgaccatgagaagaaacactcgtttgtcataagaaaggaaggacttcctgacgttggtaagatctgctgccccttgccaaaatgccaactaccagaaaatcaatcgacttttcaaaaaa

SEQ ID NO: 5943 - DNA, 384 bp, Zea mays
ctgcacgagagcaacgtggacgccgcgacgactgtgtccacctggatcgggacctcgttcttcacgccgctcgtcggcgcgttcttggccgacacattctgggggcgatactggacgatactggccttcctctccgtgtacgtcacggggatgacggtcctgactgcttcagctcttctcccgctgctcatgggcgcgtcctacagccgtagcgcccaccgcctcttcgcgtacctgggcctctacctcgccgctctcggcaccggcggaatcaagccgtgcgtctgcgcgctcggtgccgaccagttcgacgcgtctgaccccgtggagcggcgggccaagggctccttcttcaactggtactacttctccgtcaacatcgga

SEQ ID NO: 5944 - DNA, 526 bp, Zea mays
ccaccatgagtatatccaggaatgggaagcacgacgacagcgcatatttcgagatacagagcaatatgatccatcttcttatgaggagtatctgcgctggtactcaggagcaacacggcggtaccttgtcccagcaaccagtgacgacggtgaagcgggaccttcagctccaactgacgatttctcagatcttcagtaccaagccaaatctccaataatccgcaaagcagtaaaacacgaatcacttatttagttcatatttctggaaacaaaatttcatgcactgtttaagatttgagtacaagcacagcttctctcaaaattactaatgcatatagtggaccagtatttaatttgaagttttccctaactgttgtaggttgataaactggaaagcatggttaagaaagccaagagagccatgacaaccacagctgatacaactactcaagccttggttgctgagtttctgcttggctttgaggatgtgttacaagatcttggcgagatccagaataatagtggt

SEQ ID NO: 5945 - DNA, 445 bp, Zea mays
  misc_feature (377)..(378): n is a, c, g, or t
  misc_feature (383)..(386): n is a, c, g, or t
gggatcatctcatttgaatcagttaactattgatccaaaatgcctctggtgtattgtttctattgttgattgttaatagcgtcccacacattcccccatcggtcataactatgtaaaagaaatgttcagctgttcattttttggagttgcatttaccttgatttttcatatgctaaaatgtcttcactggtcaggttttgtaagaaacctaataacctattacacaataccattgttacatggacaggggtgcgggtgtctttgtctagtttgagtttgggtgtctgatttggctttttttagacatggcaaataccacgtggaatctgacatagattttgggtaagagtgcaacactcacaattaggttcgtaccnngtcgnnnncacgggcagcactatgtggttctggcggaggacgccggcaggtacaaggagttgatgag

SEQ ID NO: 5946 - DNA, 395 bp, Zea mays
tcctccaaccggtcaaccggacttaccaaggcagctttcctgcgtctgcaggtcgagatttttgagtctagcaaagatgatagcagagaggcatcgcctgaatgttctatttgccttgatggattttacgatggagatgagctgataaggttgcgctgtgggcacaggttccactcgacatgcttggagccatgggcgcggaaatgtgcagactgcccatactgtcgaacgaacatacggtcacgatcctgacgacaaacccttagttcagagtaagcttataaccaccatggagtttcactgttgtaaaattcgctgttgtgggcatgccagttaatccggtgctcctatggcgacatgtaatctctaatatcctgaatattttgtgttgtgtc

SEQ ID NO: 5947 - DNA, 918 bp, Zea mays
gaagggccgtgggtttttcgacaaggagcctttccctcttaccagtaacgatctaattgagaaggtatgctttggcagcatatgccatagatgtaagcaagttattatgtactgtcagccaccggtcagtgaggatttttgttttgaaaatcatgtagcatgaatctcctgagccaccagttttgagttctagtgtttgttaagttaagaagattggattgtagcattcaccggttctgatttctgagtagtagtaattgttaggttgagaagatccagtggcaacaaactgaaataatctaaactgcaggctactcatcattttgtcagtaaggaactaggtaccagatgttatgagtactagtaatttgttaggttacgaagagccaataatacaaaataacaaaagttcaattcggacgattgagtcctgctcacctatcaccgacatatttttcttgtaaatccagtgatcagcgaaaagcaaactacccatgattaagcgttttttttctcatgatacgttttttgggtttaacgttttcttctggagtgagaaaacagagagttggttaaatcggcttatggagattttggactcagtttcaacttgtgcactgcactgaaaatctccttttgtgcccttgcctaaaacaggctcttggagatcacggcatcatatgcttggaagacgttgtgcacgagatcgccacggttgggccgcacttccgagaagcatcgaggttcctcatgcccttcaggctcaagtgtccggagaggaggctgcagatgaagaggaaaccctacaaggatggcggcgactcgggcgaccgtggcgacaagatcaacgaactaatcgagaagctgaactagaagcgcagaccttgcctcctccggctgtcgttttgcgttggagcg

SEQ ID NO: 5948 - DNA, 509 bp, Zea mays
gagaaacgatcaattgctttgtggggaaaacgagtttgatggatcatcaaggttgtatacgctagatcagactcgagccaaaacagaagagccaatgcatccttcaaatgtgaagatggctactactacaagacatactcctgggaatatgctgtgtgatagtttctcaggtgattatcagcttaggtcagggggggatgcatcgggatcagtccagcaagcacctaagtacagaagactatgcaaatatggtgacaagatcaaaagagtctcttccatatctttggatggctgtgatgataggtttgaagaatgcaatattgctaataaagataggccaaaccaaataaaacatgctatgggtgagctggttcttgcaacccttatagtcaatgttcaatattgttattttttttttcattttcttttttgtgtttgttggaacatatctttacatcttgttggatgttttgaacctcgtattctagggacaaaaaggaagaccaaga

SEQ ID NO: 5949 - DNA, 1298 bp, Zea mays
  misc_feature (625)..(626): n is a, c, g, or t
  misc_feature (629)..(631): n is a, c, g, or t
  misc_feature (633)..(633): n is a, c, g, or t
  misc_feature (656)..(657): n is a, c, g, or t
  misc_feature (659)..(665): n is a, c, g, or t
  misc_feature (667)..(675): n is a, c, g, or t
  misc_feature (677)..(677): n is a, c, g, or t
  misc_feature (679)..(697): n is a, c, g, or t
  misc_feature (699)..(699): n is a, c, g, or t
  misc_feature (703)..(709): n is a, c, g, or t
  misc_feature (720)..(721): n is a, c, g, or t
  misc_feature (725)..(750): n is a, c, g, or t
  misc_feature (756)..(757): n is a, c, g, or t
  misc_feature (763)..(767): n is a, c, g, or t
  misc_feature (771)..(775): n is a, c, g, or t
  misc_feature (786)..(788): n is a, c, g, or t
  misc_feature (792)..(802): n is a, c, g, or t
  misc_feature (804)..(806): n is a, c, g, or t
  misc_feature (809)..(809): n is a, c, g, or t
  misc_feature (814)..(817): n is a, c, g, or t
  misc_feature (828)..(837): n is a, c, g, or t
  misc_feature (842)..(853): n is a, c, g, or t
  misc_feature (861)..(871): n is a, c, g, or t
  misc_feature (873)..(878): n is a, c, g, or t
  misc_feature (882)..(882): n is a, c, g, or t
  misc_feature (887)..(887): n is a, c, g, or t
  misc_feature (891)..(916): n is a, c, g, or t
  misc_feature (922)..(924): n is a, c, g, or t
  misc_feature (934)..(941): n is a, c, g, or t
  misc_feature (952)..(957): n is a, c, g, or t
  misc_feature (960)..(966): n is a, c, g, or t
  misc_feature (971)..(975): n is a, c, g, or t
  misc_feature (977)..(994): n is a, c, g, or t
  misc_feature (996)..(1000): n is a, c, g, or t
  misc_feature (1002)..(1019): n is a, c, g, or t
  misc_feature (1022)..(1028): n is a, c, g, or t
  misc_feature (1031)..(1034): n is a, c, g, or t
  misc_feature (1039)..(1047): n is a, c, g, or t
  misc_feature (1054)..(1057): n is a, c, g, or t
  misc_feature (1064)..(1073): n is a, c, g, or t
  misc_feature (1075)..(1075): n is a, c, g, or t
  misc_feature (1077)..(1079): n is a, c, g, or t
  misc_feature (1084)..(1091): n is a, c, g, or t
  misc_feature (1093)..(1094): n is a, c, g, or t
  misc_feature (1097)..(1099): n is a, c, g, or t
  misc_feature (1102)..(1108): n is a, c, g, or t
  misc_feature (1113)..(1115): n is a, c, g, or t
  misc_feature (1117)..(1131): n is a, c, g, or t
  misc_feature (1133)..(1138): n is a, c, g, or t
  misc_feature (1140)..(1152): n is a, c, g, or t
  misc_feature (1157)..(1162): n is a, c, g, or t
  misc_feature (1164)..(1165): n is a, c, g, or t
  misc_feature (1167)..(1182): n is a, c, g, or t
  misc_feature (1184)..(1188): n is a, c, g, or t
  misc_feature (1192)..(1195): n is a, c, g, or t
  misc_feature (1198)..(1198): n is a, c, g, or t
  misc_feature (1206)..(1207): n is a, c, g, or t
  misc_feature (1213)..(1219): n is a, c, g, or t
  misc_feature (1222)..(1227): n is a, c, g, or t
  misc_feature (1231)..(1232): n is a, c, g, or t
  misc_feature (1236)..(1239): n is a, c, g, or t
  misc_feature (1243)..(1253): n is a, c, g, or t
  misc_feature (1258)..(1265): n is a, c, g, or t
  misc_feature (1269)..(1274): n is a, c, g, or t
  misc_feature (1277)..(1281): n is a, c, g, or t
  misc_feature (1286)..(1294): n is a, c, g, or t
gctgtcgtcgctctctggctgacgtccgtcatcgtcggcgccatcaactccgtgcctctggtacgtacatccgctcctctcctcccctcccccgtggctgtgcatgtccctcattctcaaattcaactgccagctagctaggagatgactggccagcacagcaagtacatgtaaagcccggtaaaagttcatgcttggtttggttcctgcagctccccaagatcatggagcttgtcggcctcggctacaccggatggttcgtctaccgctaccttctcttcaaggtacgatgcgcacggttctttgtacagtagcaccgaaccatatctgactgaataatttggaacatgcaaattagcctaccactaaaaatgctgttgggttaacatgccggcatctatctgttcactcgattgcaggaaagcaggaaagagctcgccgacgacatcgagtcgctcaagaaaaaaattgctgggacagagtaaaacatgttgttctcgtgaaactttttttggacgattctttcgggaacacgttgcctcttgtctagactccagatcagtgctacatgtctttgcactttttttttggtgccaaacctaaggccccccccccccggaaaacnnttnnncnacaaggaaaaacaacggggaccnntnnnnnnngnnnnnnnnncncnnnnnnnnnnnnnnnnnnntnttcnnnnnnncatcctattanncctnnnnnnnnnnnnnnnnnnnnnnnnnncccccnnccgagnnnnnatcnnnnnccccctccccnnncccnnnnnnnnnnncnnnggncctgnnnnccctcacgcannnnnnnnnnttatnnnnnnnnnnnncccaatcnnnnnnnnnnncnnnnnncttnctttnactnnnnnnnnnnnnnnnnnnnnnnnnnngccagnnnccttctgccnnnnnnnncccccaccccnnnnnncannnnnnnagccnnnnncnnnnnnnnnnnnnnnnnntnnnnngnnnnnnnnnnnnnnnnnntcnnnnnnntcnnnnccccnnnnnnnnnaattatnnnnatatttnnnnnnnnnncncnnncaccnnnnnnnncnncgnnncannnnnnnttttnnncnnnnnnnnnnnnnnntnnnnnncnnnnnnnnnnnnnccccnnnnnngnngnnnnnnnnnnnnnnnngnnnnnaatnnnnccntccccccnntcccannnnnnntcnnnnnnaaannatannnntagnnnnnnnnnnnaacannnnnnnnacannnnnntcnnnnncaccnnnnnnnnnccca

SEQ ID NO: 5950 - DNA, 590 bp, Zea mays
gttgcgaaaggcctgaggagcagcagatgcaagatcttgtggtacattccagttccagtttgttaaactaatattatcttttttttacttaatataacggcgagcagttctcctatgtgtttgaggagaaaaaaaacaatactattatatatcttttttgtgcttattctactatatgtgtaccatgatgaaagactttgcattccaactcttaactcgtgtttctcattataggctgctaccatagcggagaagagggcagaaacacaaatgttcctatcacttcctacggagagaaagcgaaggagaacagaccatagtttgttgatgcttgactcatttgtccctaaacaaagaagaagaaaaggtgacacaggtctagcaccagctgatttgtcattggatttacatcaaactgctacatcacaagaacctgacatagctatagaggaagaagagaaacgtaaaaatgatggtgatggtcttgaggattattggaaagattttgcattggctgttgaaagcacaaaggtatgagtatcaaccacagaatttgatttatattgcagcaccacatgaaaatctttttt

SEQ ID NO: 5951 - DNA, 518 bp, Zea mays
tacaaaagcattgccatgtagtaggagagaaatgctaatggtgctcactgtaatatcttgacaatgatgctacaaaacttgaactaaaattgaaactttgaagtggttgcagcaataagaaatataaaggaaatgagatacacacatcaaggagaagctatacaaaataacaaccttaaagaaaagaaataccttgattcctctatggcgaggtggctccagtacctccgatcatctatcccagtaatagtcattgcctttgatgatatactcatgcaaagggctcccttgttcttcagaatcgagaattcctaaaatagacagcatggatggctattaagcaaaatagacaatttcaagcaaacacgaggctaataacagaaccgcatccacaacagatcggccctaacaaacaagcataatacctccatggaggaatgaccaaatgagtttacctttctgtggcatcaaagagggtggatcggcacagacgagcgtaaatctccttcttggtcaaa

SEQ ID NO: 5952 - DNA, 395 bp, Zea mays
gcgaggaattcggtaaaatgggcgaaccaatgagcgtcgttaatttttttggtttccgagtcaaattactagttgtgctgatggatgtttttgcgtgtgagattggagaagggagatccccaaaattttatggatgaagaagaaaatgaagtcgaagagtgacgcttgcaagatgcttgacgaaaggcgtgaaccgtagattgatcactgttcctcaattgccgagttaaattttattgaggtgagtgattcgctgctcctgcataatagatcgaagcatggaatggtttagtatattaggtgtgataattttattgctatggttaggatgtgttgtgactgtattagatgtttgctgatgtatcatatatgcaatgtatgtttgaggaaagact

SEQ ID NO: 5953 - DNA, 716 bp, Zea mays
acatctccttgtaactgaaattgtattcagggtggaggctggtgcaatgatcgcagcagctgtgtgttccgcaagggcagtcgtcgtggatcatcaaatcacatggagaggcaactccagtttacagggatattgagtaacaaacctgaagagaatcccggtattgttcttagcaaacctgcctcgtggttctttttgtttttagatttctactgtgattttgttcacactaaaaaaaatctgttgattattagttatcatctgtggttgtgtgattgttattatattttctcttagatttctacaactggaatagagtgaaggtccggtactgtgatggtggatctttcactggtgatggctctgatgcggttagtgaaattctgtctcatgtcgccacattttgtttccttattagttcaggacacaaactaaatgtgcgtgccatgggatgcaactccaaaaatctatccttgctttgttttgtttactgaaccacaacaattcactgtctgatttccttctttttctttaggctgcaggcctttatttccgaggtcagcgcatttggcaggccgctatggatgacctaatggcccaaggaatgcgttatgctaatcaggtatttacacttaatttcccctactcttctgttactcatttttctttagcttttcagaggtcattttcatgtccctgatgcaatttatcgtata

SEQ ID NO: 5954 - DNA, 853 bp, Zea mays
  misc_feature (795)..(796): n is a, c, g, or t
gatgtttcttcacctgtagagtgcagtcgttatcaaaattccaggtacggaatattgatgaaaccccaaattttacagttcccaaaagaacaaaagaagttgaggtaatcagttgaagtttcatgtgcaattgtgaagaacatacctatcgatggtagattcttccctgtgtgatgtagccagagcagacgacagatcaatacaggatctacaactcatgcaacatccatgatctatgttcagactgacaccactattttgcaagagagatttggcgacattctccatatccatatcaaccttcgatacatcctaaaagaaactcagcatcatgtcatatgtgatccatcagcattaagtactcactccagtcacaagtgtcgttttgaagttatctcaagttaaccattcaaaattttgatcgtatactagtttttatatgttgagtttggatatttcaaaatagcacgagcagatttgtcagagttttcattaaatatagtttcataaaagtaaccaattttctttgattcataaatattttgtaacaaaaacagtactcaaagttgtgttttgaagatcatatcaatgtttaaaaggtcaattatttgtgactagagtaaatgagaagatattaaaaaccatggtaatgaaaataaccgtacgggcaatgatagtttgcagacataagatcctccaagggaaacattcacgaaattctctttggacctgtagtaagttgattccgatatggcaccaaggcagttgctttgtggacaacgagaatgaattaanngcaaggtctgataggtttagctctgaacaacttgaacattgacaactgaagtagtaa

SEQ ID NO: 5955 - DNA, 1204 bp, Zea mays
  misc_feature (1146)..(1148): n is a, c, g, or t
  misc_feature (1193)..(1193): n is a, c, g, or t
  misc_feature (1195)..(1200): n is a, c, g, or t
tttttggctaggtactttttcaacacagtatattcatctatagtagccgagtagcagtacctcttgttaatgcttaccaaggatgcaaacttgaactattgaagaggggggagatatacagaagaagatgccaaagctatcgttgtacagattttgagtgtagtgtccttctgtcatcttcagggagtagttcatcgtgatttgaagccagaggtatgcttgaaccacttcgtttatggcttgcatatatgtgcagttcagtacttcagtaggtgtttgactggggttagttctgccatcttattcaatagcacttgctgttttttgtatttaattgacagcaataatgcttgttttgaaagctaggctgcctttgtgacgtagttgctatatttcattggcacagaattttcttttcgcaacaagagatgaaagtgctcctatgaagttaattgactttggtctgtctgattttattagaccaggtaatgtactaatatttatctcttttacacggctcacatggttatttctgctcttgtaattaaaagtcattactttgttcaaaagtacatttctcagttagtcagtcagcagcttaaaaacattgattgctaataaaacctgggtttaggtgaacttcttacaacagaaatcaggcaatacagtgttagtttcaggatattttttgctgtatactcagtctcgaggatttcattacgcaagtttgaaccggatgtgcattttattatggttttgcttttccatacctttgttcatacttcatagtgtgccccagttagctcttatgctgtacaaacagatgtttgtcataggctgcattttgatgatttgcttattagtcttgcattttaattgtttagcttgtgcatacatgctaggatcatcctgtgtgttgactttgtttttgcatctttctttatgtttggaacttggaagacactatcattatttacagttaaccatttcttttgctcattcattaactcaatcttatacttaatcttatatgttctgtgctacatattgcagatgaaaggctcaatgatattgttggaagcgcatattatgtcgctccagaggttctacacagatcgtacagtatggaagcagacatttggagtnnnggtgtcataacatacattctgctctgtggcagtcggccatttggncnnnnnngtca

SEQ ID NO: 5956 - DNA, 1451 bp, Zea mays
  misc_feature (1447)..(1447): n is a, c, g, or t
atggtatgcatgttaatgagttcgttccatcttgtgtctgctctagtctcactaaatagtgccttgaagtcagagaaataatacagactggctagaaaggcaatcccatgtcctcagtttgatgggtaaacttcattgtctggcctaggctttagtgttctaaccatagtgctgcatcctggaagataacaagacagttacttttagcaccgttgttcacgtgttaacaagaacaagaggggctggcatctagtgagctcgtgtgcaacaggtcaacatgtacgtcccggttaaaaattattacttgaagaatgacttgttgtctagcgttgaattgaacacgttcgtctttaaatgcaatccattcattttacacgtttcctttaacagtacaacaatgtgttggaattgtgaaatggtttcaaagcactcctatattcagacagggaataggacctggtctgacagtcatgtcatcaattaatcatcattggaaacaacctacagcatgatgtattccgtttgttctactggttagtgctattatttttcatgatgtctgttacacttaacaaaaggtcatctttttgtacaggatgtgttgtttgtggacagtggcgatccatgggaccccaatcctacaacagtggaaaacgtgatgaaaatgcttaatggtatccacagggttttgaagccagaaggcatctttgtatcaattgcctttggacaggttagggagatttaccaacagtctttttttcagagttcttttgggtttgctttacctatttacagtatataaatgtctccattacgtgggaatgtggtttctttttgaatgaaaccacttttctctcagaactatgtgccgcaccattgctactggaagatgatattgtgaaatagttaaagactgtctttcctatatgattaaataaataagtaaagatggaaaagaggatctaaactggaggcagagttgatgtcttattatttttcttatctattgatcttctcttctcaatgaagttctacttttcatatgtcagccacactttcgacgccgattttttgaagctcctgagttaacatggtctattgagtacagtacctttggcgacagcttccattatttcttctacactcttaagaaggttagttatgttcatttccttcgatctcactcgagcctatcagtttatcttgaatatttgcctcatacgaattatgattcttccattatacaagttttttcattgctgcaaccactttgtccctagcgaaaagctatcttcttaattatttgccttttcttaaactctagggcaagaggtcactggagtccagcagttaccaaaacacattaccatcacctgttgctccaagaataaatatggtccacgaagagctcgagagcgaggattttatattcctcacaaacctgagngtgg

SEQ ID NO: 5957 - DNA, 588 bp, Zea mays
aaatgctagaggaggtcaacaggtaaataatacaatgatatttaccgtgatatatattgcttgattggatacagcttctatttaccggtcctgcatgcagaatcctcaaggaaaatggtgtctacatgctggtaacctgaactatttgattctttattctttaaaagatgtggttattttgtgctcatctggtgtctttaacaaatttctgactcctataatgtcttagatcacttatggggatccaagttaccgcttgcgtctcttgaaggacatggaaaaatggacagtaaagctccatgtcataggttagttagttactcaccatcaggccaattcaactgcaccttccggtatttgcagagctccaatcacattgaccttttctcatatccaaagtaacgtttagattcatgaatgtattccagagtagctatgttttcatttttcatggtaaaatgcttgtgcttacaactgtaagtgtactgggttattgcagaaagatgggagaaaagttcgaatcagaacaaatgggaactgacaaagccattgcctctagaggaccatagcacatcactagcctgcact

SEQ ID NO: 5958 - DNA, 1095 bp, Zea mays
  misc_feature (20)..(21): n is a, c, g, or t
catgcagtgcagggccagcnnggagaggatctattccactggcaggccacaatcatgggttctagcgacagcccctatgcaggaggggttttctttgttaatatccattttcctcctgactacccgtttaagcctccaaaagtgaacttccaaacaaaagtgagctggtcttattaatttgatttccttcgcttttgatattcctttattctgcaaaagtatttgaacctctattatgttgccaatagccatggttacggatgaccttttatttttggcatactaggcaataggagtgatctgaagttcgtaatgaaaaggcccccattccaaaatcataccaaaattgttaaaactttgttctctgttatgcaaaataaaacatgctcaggttcttctctacatcaatcaccattttattttcaaaacttttgtttttcttcctgatgtgaagtaaatagttaagatcatgctgaatccttaagtacttgttcctcgtaataaacccatttcacttgcttcggcagtttcatagagttatttttcttcctgaaatttggttctagtgatgcttgaaaggcaatggataagttgtcatggggcagagctcaaacatgagtacttgctagcatcctgaagttgagacatgaaagtgtcagtcactcagtctgttagcaattgttcaaagtctggttctgtcaaaccatttatccttcttgcaactaattcagctcactgtctcactgaaaacgtacaggtttatcacccgaacatcaactctaacgggagcatctgccttgatatcctcaaggagcagtggagccctgcactgaccatatcaaaggtcctcctctccatcagctcgcttctgactgaccccaacccagacgaccccctcgtccccgagatcgcccacatgtacaagaaccagaggccgcgctacgaggaaaccgcacgggcctggacccagaagtacgcgatgggctagctgattctgtctcgccgaacaatactgtcactgcgaagaagatcatcatcacaatgttgtaagaaattaagttgaaccggtttccccgtcgtgtgatggtattaaga

SEQ ID NO: 5959 - DNA, 370 bp, Zea mays
gcagatgcagcaaggatcgtggatgagatggaaaccgctggggtgcagccaaatgaggatgcatactctgtggatactctgtggtggtcaaagccactgcaaggagggaaaatccacataggcgtgtgatttagtgagggagatgctagaggcaggtgacagggaaatgtgccatggagccatttctacctgttttggtgattaagtgctcaacacaccatcttgaactatcttcacatgagcatgagcacatgtttacataaaggcaagttgaagagatcaagtccaaatgagctaatctggagggccaaaagtgcaactttgggcaacacaacataaacatgaggtttaagcgtttgaataagttgcg

SEQ ID NO: 5960 - DNA, 378 bp, Zea mays
ggcccccagccaggctgctctcaacgacgagggtgtcgacctgcccagatgggtgcagtcagttaaccgctcggagtggggttcactagtgtttgatatggagctcatgagacatcagactggtgaggagcccatggctcagctcgtgctgcttgctatggactgcacagcacaagtcccagaagcccggccgtcaatggcgcatgttgtcatgcggatagaggagatcaagaagtcaagcgtgaccccgaacattgaacaagttgatgatcaatcttcaagggctgaatcggaggcggcgccgaccaatccgtttgctacttgatatgagttgacctgagagagagagaatctgctataactctagcctgcattcaa

SEQ ID NO: 5961 - DNA, 918 bp, Zea mays
tggataagtagacaaggtaaagcaattgtaaaattttgtagtctccttttgcacctttggatacaactgatttaaacagttcgttttggcaggaaagtgagagggctgtcacgaaaaaggagggaattgaatttgccagggaatacggttgtttgtttctagaatgcagtgcgaaaacaaaagtaaacgtagaacagtgttttgaggaactggttctaaaggtatgtatatatattttcgcagtaccatgtatgccgccttattcttgacaatattccaagctgcacatacctgcaaatcgactattgagatttagggggtgtttggtttctagggacaaaattttagtctctccattttattccattttagtttctaaattatcaaatacggaaactaaaatagacatttggcagtttagggaataaaatagtgggactaaaaataagagggtgtttgaatgcactagagctgatagttagtagctaaaattagttggagacatccaaacaccatagctaatagttcaactattagctattcgttagttagctaatttcactagtaattttttagccagctaaatattagctctagtgcattcaaacaacaccttagtctctagaaaccaaacacccccttaaatggggaaggaagcagatagataagatccttgttatttatagtattggcctgtatgcacgttgcagatcttagacacgccaagcctcctggcggatgcttcctcagcaggggtcagcaagaagaacatcttcaagcagaaggctccagaagctgacgccgccacaggcagctgctgttaacatggttttggtcctgtatattgctatatgtggtgaagacaattggcagcagctatataatgatgtatcaagttaaacttacctgacaatatgt

SEQ ID NO: 5962 - DNA, 387 bp, Zea mays
  misc_feature (376)..(383): n is a, c, g, or t
gatggttcccagataatgggcatattgtcttcactccgaattttctcttcaaccatcttttcaacgacctccagcattacactagaatacttgtctaccgtttttcctatgtattcttctgcagaaagagctctagtgctttggcccatttctcctaaccttccattttccgagtagccccaaccaaatagctttccatcctttgtcagtgccatggcatgtccccatccaaatgatacctaacgttattccttcagttaacgtcattgccaatcaatttattaaatttctgtgagaaaattagcaccttaacaatgtcgtagctagcaagagctttcactttagatggcactgctgcctctacaatgtccttccnnnnnnnnaagt

SEQ ID NO: 5963 - DNA, 390 bp, Zea mays
acgaatcgacctcgaagctggtggtgcacctgtccaagccctgcgaggtgagcttcaaggattcctccaccgtaaggtatgctcctcgtgtcaaggcgactctgtcccgaggcaagctttccggggttgaaggcatgaagaccaaggtggtggtatgggtgaaggtggccagcgtgagcatcgagagctacaagtctgacaagatatgcttcatcgccggtgtgaagaagctgaggccgaaggatgcttatgaggtccctcgtgaagccatctctgtcgaggagttctgagctcaactcaactccattggtttgcctagttgccttatactacgtagtatcattcattcgtagcatttttcgggtcccatgtgatcggcgattgatgtgc

SEQ ID NO: 5964 - DNA, 1115 bp, Zea mays
  misc_feature (510)..(541): n is a, c, g, or t
  misc_feature (547)..(549): n is a, c, g, or t
  misc_feature (556)..(562): n is a, c, g, or t
  misc_feature (568)..(573): n is a, c, g, or t
  misc_feature (575)..(577): n is a, c, g, or t
  misc_feature (579)..(579): n is a, c, g, or t
  misc_feature (600)..(608): n is a, c, g, or t
  misc_feature (610)..(612): n is a, c, g, or t
  misc_feature (617)..(621): n is a, c, g, or t
  misc_feature (623)..(623): n is a, c, g, or t
  misc_feature (627)..(631): n is a, c, g, or t
  misc_feature (634)..(635): n is a, c, g, or t
  misc_feature (637)..(640): n is a, c, g, or t
  misc_feature (642)..(644): n is a, c, g, or t
  misc_feature (646)..(666): n is a, c, g, or t
  misc_feature (673)..(676): n is a, c, g, or t
  misc_feature (682)..(686): n is a, c, g, or t
  misc_feature (693)..(695): n is a, c, g, or t
  misc_feature (698)..(699): n is a, c, g, or t
  misc_feature (707)..(709): n is a, c, g, or t
  misc_feature (711)..(722): n is a, c, g, or t
  misc_feature (724)..(726): n is a, c, g, or t
  misc_feature (728)..(730): n is a, c, g, or t
  misc_feature (739)..(739): n is a, c, g, or t
  misc_feature (746)..(750): n is a, c, g, or t
  misc_feature (753)..(753): n is a, c, g, or t
  misc_feature (757)..(758): n is a, c, g, or t
  misc_feature (760)..(760): n is a, c, g, or t
  misc_feature (764)..(766): n is a, c, g, or t
  misc_feature (768)..(772): n is a, c, g, or t
  misc_feature (782)..(785): n is a, c, g, or t
  misc_feature (787)..(790): n is a, c, g, or t
  misc_feature (792)..(795): n is a, c, g, or t
  misc_feature (800)..(811): n is a, c, g, or t
  misc_feature (818)..(820): n is a, c, g, or t
  misc_feature (822)..(825): n is a, c, g, or t
  misc_feature (832)..(838): n is a, c, g, or t
  misc_feature (841)..(843): n is a, c, g, or t
  misc_feature (846)..(847): n is a, c, g, or t
  misc_feature (849)..(857): n is a, c, g, or t
  misc_feature (861)..(865): n is a, c, g, or t
  misc_feature (867)..(870): n is a, c, g, or t
  misc_feature (874)..(879): n is a, c, g, or t
  misc_feature (881)..(890): n is a, c, g, or t
  misc_feature (893)..(909): n is a, c, g, or t
  misc_feature (916)..(924): n is a, c, g, or t
  misc_feature (926)..(926): n is a, c, g, or t
  misc_feature (929)..(938): n is a, c, g, or t
  misc_feature (942)..(943): n is a, c, g, or t
  misc_feature (949)..(956): n is a, c, g, or t
  misc_feature (958)..(965): n is a, c, g, or t
  misc_feature (967)..(967): n is a, c, g, or t
  misc_feature (969)..(976): n is a, c, g, or t
  misc_feature (978)..(985): n is a, c, g, or t
  misc_feature (988)..(989): n is a, c, g, or t
  misc_feature (993)..(1003): n is a, c, g, or t
  misc_feature (1010)..(1013): n is a, c, g, or t
  misc_feature (1016)..(1019): n is a, c, g, or t
  misc_feature (1022)..(1030): n is a, c, g, or t
  misc_feature (1032)..(1045): n is a, c, g, or t
  misc_feature (1048)..(1048): n is a, c, g, or t
  misc_feature (1050)..(1050): n is a, c, g, or t
  misc_feature (1052)..(1059): n is a, c, g, or t
  misc_feature (1062)..(1069): n is a, c, g, or t
  misc_feature (1072)..(1086): n is a, c, g, or t
  misc_feature (1089)..(1090): n is a, c, g, or t
  misc_feature (1092)..(1096): n is a, c, g, or t
  misc_feature (1101)..(1108): n is a, c, g, or t
cccctgcacgtacccgacgtaccagccgaaggagcggaggacgtccaagtacgagagcaggcggtacgagaggcggagagatgggccaccggcggccagcaggaaaccgaggcagcaggcaccagctcagactcagaccgagtcggcgtcttcgtgacgaggtgcacagtgcattgcaacttgcaagacgcagtctgaatctctaaccgtgtgttgaggacttgagattggttgtgtactttttaaccccggtgcttctttgtatcagctctgcaggcattttgtccacgtacctacctacctagaagtagaacaagagaggaggacgcctaaaattctgtcgcattgggcaccgcgtactggactggacaggcgggtcgggatccatcatccatcgtcagccagaaaaattgtcgctgtccaagcagcctgggcagcttgtgtgtgactgtgctgataagcctgatatcttgagctagctgtggcagaaactggaaaccctactgtgannnnnnnnnnnnnnnnnnnnnnnnnnnnnnnntactannnttttcannnnnnnaatatnnnnnntnnncncctcacattaacattccatannnnnnnnncnnnattcnnnnngncatnnnnnacnncnnnnannntnnnnnnnnnnnnnnnnnnnnntctatcnnnnaacatnnnnncctaccnnnaannaacccttnnntnnnnnnnnnnnncnnntnnntcatttacntttcccnnnnnatntccnntncttnnntnnnnnaattcctaannnncnnnnannnntttcnnnnnnnnnnnnaaccacnnntnnnnctccccnnnnnnnacnnnccnnannnnnnnnntccnnnnntnnnnaccnnnnnncnnnnnnnnnntcnnnnnnnnnnnnnnnnnttcatcnnnnnnnnntntcnnnnnnnnnncttnntcttannnnnnnntnnnnnnnntncnnnnnnnncnnnnnnnncanncccnnnnnnnnnnnccccccnnnnccnnnnacnnnnnnnnnannnnnnnnnnnnnnttnancnnnnnnnnctnnnnnnnnccnnnnnnnnnnnnnnnctnncnnnnnccatnnnnnnnnattaccc

SEQ ID NO: 5965 - DNA, 395 bp, Zea mays
gcatcaaaaaccaagatagttagggacaaagtcttacgggcgatgggcaaaacattggagcttggcgaagactatttcatcagccagattggtgacagggcctcagcaattgctaggttcaactactaccctccctgtccaaggcccgatcttgtctttggcattaagcctcactctgacggtggcgcggtgacgatacttctcgtcgacaaggatgttgggggcctgcaagttcagaaagatggcgtttggtacactgttccgtccatgcctcacacgctgcttgtcaacttgggtgactccatggaggtaggttgggtatctccatgtcccaaagcgctttctctcacttgaatcttcatagattcagttaacagaaacaaagcgagtcagtg

SEQ ID NO: 5966 - DNA, 1041 bp, Zea mays
  misc_feature (1035)..(1038): n is a, c, g, or t
ccatcgatcagagggcccggcgctgttgcctttcgcattcgattcctttcgggtcggatttgtggcggagctcttgatttgctccgtccctgccagcggaggagggcttgctggatcagggatcgagcaaggaagcagccatgagcggcggcggaagcgtgagtttcctcgagatccagccgtcggagctcgcattcccctgtaagttctcccagatctcgtatctaggctgtttggatcatgttgggatgctgacgtaactgttccttttattggatcttggtcaaagctgtgatcttggtagggaaacatggtcggcgatcctccctaggtggacttgctaccccctactcagcttggttcgtggagtgggttgtagaatcgtgccttcttgtagcagtaggttccgcccatcattcgaatgacgtgtgctagtatttgtgtgccgatctgttcgtctgctgggggtttgagtgggccagatttgtttgtttcttggtgcacgcttccggtgtgcattgtgtgtggtgagtggtgagtggtgactcgtcgttttggtagttatttggcctttccggggctttgggatctagtacaaaagattgcgttgtaactgtattggtgtgcgctgtttgttttcgtgtggtagcgtgaaatgaaatttgcctgtatatttggcgccgcttttgactctggtcattgtctgcctgcttagcttgaaataactgcaatgcgttataggtctttcaattgactatacagtaggttaaactgtcctgctatgtgcctgaactgttttttatttttgtttgtacatgacagttgagataatgaggcagagctcgtgttccatgcaactgaccaataagactgaccattatgtagcattcaaggtaactattgttcaatgtcacttttcatgctccaagagtccaagatattcacttggatagattgcactgtagacacaaatcttatatcttatctgtgatttgtaggtcaaaacaaccaacccaaagcagtactgtgtgcgtnnnnaat

SEQ ID NO: 5967 - DNA, 1305 bp, Zea mays
  misc_feature (51)..(52): n is a, c, g, or t
  misc_feature (757)..(757): n is a, c, g, or t
  misc_feature (763)..(763): n is a, c, g, or t
  misc_feature (787)..(787): n is a, c, g, or t
  misc_feature (796)..(796): n is a, c, g, or t
  misc_feature (882)..(882): n is a, c, g, or t
  misc_feature (946)..(946): n is a, c, g, or t
  misc_feature (972)..(972): n is a, c, g, or t
  misc_feature (976)..(976): n is a, c, g, or t
  misc_feature (987)..(988): n is a, c, g, or t
  misc_feature (1005)..(1008): n is a, c, g, or t
  misc_feature (1012)..(1012): n is a, c, g, or t
  misc_feature (1015)..(1015): n is a, c, g, or t
  misc_feature (1019)..(1019): n is a, c, g, or t
  misc_feature (1030)..(1031): n is a, c, g, or t
  misc_feature (1040)..(1040): n is a, c, g, or t
  misc_feature (1042)..(1043): n is a, c, g, or t
  misc_feature (1045)..(1045): n is a, c, g, or t
  misc_feature (1047)..(1050): n is a, c, g, or t
  misc_feature (1060)..(1060): n is a, c, g, or t
  misc_feature (1062)..(1062): n is a, c, g, or t
  misc_feature (1065)..(1065): n is a, c, g, or t
  misc_feature (1070)..(1079): n is a, c, g, or t
  misc_feature (1088)..(1088): n is a, c, g, or t
  misc_feature (1109)..(1110): n is a, c, g, or t
  misc_feature (1121)..(1121): n is a, c, g, or t
  misc_feature (1130)..(1133): n is a, c, g, or t
  misc_feature (1169)..(1169): n is a, c, g, or t
  misc_feature (1175)..(1175): n is a, c, g, or t
  misc_feature (1178)..(1178): n is a, c, g, or t
  misc_feature (1190)..(1192): n is a, c, g, or t
  misc_feature (1214)..(1214): n is a, c, g, or t
  misc_feature (1218)..(1218): n is a, c, g, or t
  misc_feature (1233)..(1233): n is a, c, g, or t
  misc_feature (1240)..(1249): n is a, c, g, or t
  misc_feature (1253)..(1257): n is a, c, g, or t
  misc_feature (1267)..(1268): n is a, c, g, or t
  misc_feature (1280)..(1292): n is a, c, g, or t
gggagagaaatcaataacggcgttgacatacccagtatggaattcatgatnnaaggtctaacaacacatcatgtgcctagtgaggacatggcacttgttttatacaaaccagtagataattccgcaccatttggtcgtggcatctcaagttcttcattcatagtgagttcagacttgatacgtggtctaaagagtaagtacatcgtgatcaaccttctttagtcaccgtttatatttaaattcaccattcctacgagtctttgctattttggtcctgcattttgttagggggcttgctgaaatcagtgtgcctgaattttagttattgcatatattttatattaaaattgcagattcagagaacaaaaaaaatgtaggcataatctgcaattttcaactctgagaacaaaaaacctgctaagcaaaatcacaaatccgacaaaatctgatccatgttggtacaaagacaattatcaattatctctagtcaaataaggacaaaaaaatgattggttttgatacaaagaatcataaatcataaaaacaacaatttacttatactagttggttgtataaaagtgatgcctaaaatcatttaaaaattcaggcacctgaaatattgaagtgttttgttagattttgaagtgtcaaatgcatgtccagaacttgtatgactacaggtattatcggtacctaagtatttgggtgttgcttgtgcaaatataaactaacctacttagatttttatgttagcttntatatntatgacatgtccaaacctatctcntgatgcagntagttggtgaataaacaggaagcatgaaatgcctgttggcctaggggctaggggcatgagatgatttgtttagccatggcatcacntgcttacattgtgatttgtgtgggtgaacacttggtgtgcccttttctagtgctgtagttgtgnctgcattctttggtgtgcagaatatntganccatgtcatgnnttttaacgtgatttacnnnncaangantatnttattttgttnnctttggttntnntntnnnntagagctttngncantggcnnnnnnnnnngtcaccttnacatgcagcatttttttccanntatacatgttntgaattacnnnnaacccaattttttgttgactgttcttacttttcagnccatgnttncaatcaagcgannnatcatgtggtggaggatgaatntccngaacgtaggaacagnttggctnnnnnnnnnnggannnnnccacaagttnntataagatctgnnnnnnnnnnnnngccagagcgcaca

SEQ ID NO: 5968 - DNA, 577 bp, Zea mays
cttatctaagaaaattatggtatgtagttatgttcagttatagctcatgcaaatctctaatgaaaactaatttaactcttctgtgtctatcttccaggttggaagtttggaggatgtcctgaagaaaatggaggtaggatggatataaaatggcagaatggatattgcttgtacagttgtactagttcagcagctcttaccattatgctatttgattctgcagataaatgaaagagattctggctgggatgatttgatctttataccccctgggaagagcctcaaccaacatatcaatgaggtatcagcgtgattttgttccacggtgatagctcagagtttgagcagactattcacttcaaatgctatgatggtcagccaaacgaaatatcaaattgctgcctgagctttttctttggatagctattttcatggtcagctttgtcagggaaaattaactaaagtgatagaatatggctgtgaaacaattttcttgttgcttcgattcacaaaattaacacaggttacacaagaagatttgatgaagagaaagttgcgacattggtaaatcacctta

SEQ ID NO: 5969 - DNA, 373 bp, Zea mays
agctgttgcggaaccggtgggagatgtagctgctgcggaacacgaaaggtattatgccaatctgtttttgcttttcctaatatatatgaacatggatgaatcacaagcaacttcctaatatatatgaacgcaaatgaagttttgcattatttaagttttaatcaaggaaatggtccaagggtgcatcactggaataagctcgagaccacaagtgtcatatctcctctaatctttactctctcaggtatatgcatgcttggcattgtcttaatttatttatcacttctaaactaagaatacgttaagctcttcatattttgttgtttatcctaatttgtctccattcggcttcatagtctggtgtctatcaaaa

SEQ ID NO: 5970 - DNA, 1335 bp, Zea mays
  misc_feature (770)..(771): n is a, c, g, or t
  misc_feature (773)..(774): n is a, c, g, or t
  misc_feature (777)..(805): n is a, c, g, or t
  misc_feature (810)..(810): n is a, c, g, or t
  misc_feature (821)..(833): n is a, c, g, or t
  misc_feature (836)..(842): n is a, c, g, or t
  misc_feature (849)..(873): n is a, c, g, or t
  misc_feature (875)..(877): n is a, c, g, or t
  misc_feature (879)..(889): n is a, c, g, or t
  misc_feature (894)..(894): n is a, c, g, or t
  misc_feature (897)..(897): n is a, c, g, or t
  misc_feature (899)..(902): n is a, c, g, or t
  misc_feature (904)..(906): n is a, c, g, or t
  misc_feature (909)..(912): n is a, c, g, or t
  misc_feature (914)..(914): n is a, c, g, or t
  misc_feature (916)..(921): n is a, c, g, or t
  misc_feature (927)..(941): n is a, c, g, or t
  misc_feature (943)..(954): n is a, c, g, or t
  misc_feature (958)..(964): n is a, c, g, or t
  misc_feature (969)..(977): n is a, c, g, or t
  misc_feature (979)..(996): n is a, c, g, or t
  misc_feature (999)..(1004): n is a, c, g, or t
  misc_feature (1006)..(1008): n is a, c, g, or t
  misc_feature (1015)..(1018): n is a, c, g, or t
  misc_feature (1020)..(1022): n is a, c, g, or t
  misc_feature (1026)..(1027): n is a, c, g, or t
  misc_feature (1032)..(1043): n is a, c, g, or t
  misc_feature (1048)..(1056): n is a, c, g, or t
  misc_feature (1059)..(1060): n is a, c, g, or t
  misc_feature (1062)..(1064): n is a, c, g, or t
  misc_feature (1066)..(1066): n is a, c, g, or t
  misc_feature (1069)..(1083): n is a, c, g, or t
  misc_feature (1091)..(1091): n is a, c, g, or t
  misc_feature (1094)..(1113): n is a, c, g, or t
  misc_feature (1115)..(1120): n is a, c, g, or t
  misc_feature (1122)..(1129): n is a, c, g, or t
  misc_feature (1133)..(1136): n is a, c, g, or t
  misc_feature (1140)..(1155): n is a, c, g, or t
  misc_feature (1157)..(1172): n is a, c, g, or t
  misc_feature (1174)..(1178): n is a, c, g, or t
  misc_feature (1182)..(1189): n is a, c, g, or t
  misc_feature (1191)..(1191): n is a, c, g, or t
  misc_feature (1193)..(1207): n is a, c, g, or t
  misc_feature (1213)..(1225): n is a, c, g, or t
  misc_feature (1228)..(1231): n is a, c, g, or t
  misc_feature (1233)..(1233): n is a, c, g, or t
  misc_feature (1235)..(1244): n is a, c, g, or t
  misc_feature (1246)..(1248): n is a, c, g, or t
  misc_feature (1250)..(1260): n is a, c, g, or t
  misc_feature (1262)..(1270): n is a, c, g, or t
  misc_feature (1273)..(1287): n is a, c, g, or t
  misc_feature (1289)..(1289): n is a, c, g, or t
  misc_feature (1293)..(1293): n is a, c, g, or t
  misc_feature (1295)..(1303): n is a, c, g, or t
  misc_feature (1305)..(1328): n is a, c, g, or t
  misc_feature (1330)..(1331): n is a, c, g, or t
atcaagaagcgggtcacttgatgaagtcttcattcctttccactctttcttccgcttcttggagctagatgatgttgagtcaacagaacgccttggtgtctctacagatgtcatatcctctccattctattcatcattagcatttacacgaactaactcttcttccaagttttgaacagcatctgtcatgtcttccgcaccttcacctgtggccatgtccttggaatataccattgagagttcatcatagtaaggaaaggagactccatacaacccttttgcatctggattattctgtgaaataaaaaatctgatcagaccaacaaatacagaaagcagaaagcaagccagaaagcaagccagacgtcatgtgaaaagctgcctagctcgatacaagtagcgtgtgtgcgtgtttttctaatcctcctgaactaacattttttatttaaagtgtacacagcgacatgagccaaatgagcagctttcatgattattagatccagacagcatcagggctccgtgtgggaataatagcacctgcaatcattcacagggaccgggcataggtacgtcatgtgaaataatagcaggctgcagtaggataagaaaaaaagatgaatgtaggcttcctatgtgaacccactcttgttcaacatgtgaacaatgtgaaaaaaaggggctgatcaattataaagcagctgttaaatggctgaaaagtaccttgcaatgtgtctcatattgttgtttctcgcactgaatcatcttctggnncnnatnnnnnnnnnnnnnnnnnnnnnnnnnnnnncccgnactgaatcctnnnnnnnnnnnnngannnnnnnaaagcannnnnnnnnnnnnnnnnnnnnnnnntnnntnnnnnnnnnnntcccnccncnnnncnnnccnnnncncnnnnnncacaannnnnnnnnnnnnnncnnnnnnnnnnnngcannnnnnnaaacnnnnnnnnnannnnnnnnnnnnnnnnnnacnnnnnncnnnacatacnnnntnnnactnnaaatnnnnnnnnnnnncctannnnnnnnnagnncnnncnacnnnnnnnnnnnnnnnattttacnaannnnnnnnnnnnnnnnnnnntnnnnnncnnnnnnnnctannnnatcnnnnnnnnnnnnnnnntnnnnnnnnnnnnnnnntnnnnnatcnnnnnnnntnannnnnnnnnnnnnnngcatcnnnnnnnnnnnnncannnncncnnnnnnnnnntnnncnnnnnnnnnnnannnnnnnnntannnnnnnnnnnnnnncnccgncnnnnnnnnncnnnnnnnnnnnnnnnnnnnnnnnnannaacc

SEQ ID NO: 5971 - DNA, 951 bp, Zea mays
  misc_feature (938)..(938): n is a, c, g, or t
  misc_feature (941)..(943): n is a, c, g, or t
  misc_feature (946)..(948): n is a, c, g, or t
gagcgccaacggcacttctgtggctgacaagcgcttcaagacattgccgacgagtgagatgctaccgaggaatgaagtccttggtggatacatctttgtctgcaacaacgataccatgcaggaggatctcaagaggcagctttttggtatgttatcccgtcccttttagaaatcaaatgataactgttctggattttttttaaaaaaaaatatatagttttgatgccagtgtgtaattcgataatggtatctcaagatctattgctcttctgcaggtttgccagcaagatatcgtgattcagtccgagcaatcactcctggcttgcctcttttcctctataactacacaacccaccagcttcatggggtatttgaggtgtgtgattggttatctgatttcctgattcctgcaaagcctatctcaagttgttaaacacttgttcgtttgtcatacaaaagatacttttgagctaaaaaaattgtgcaccttagaaatgatgttgagcattcgttcattattaccattctagatagactgctcactgctcgtgtcgttatatgtaacttcttaccagtaataagaaacatccatctattacagcaaatgcatcgaagaggcttgattacatgttttgtttgatgacttgtagcctcacatgtgatttagttggtttcagtaaataaaatgttgtactttggtttccacacatttgtatttttcatatggaagttttgaattccaatcacacttaagtataaatctaaggaccttttatcttttggttttgaaacgaatctgcttaggctgccagtttcggtgggtccaatatcgatcctactgcatgggaggataagaagtgtaaaggtgaatctagattcccagcgcaggtactggtaacatcatttgtcattacgttcattcctcatttccttttgantcnnngcnnntga

SEQ ID NO: 5972 - DNA, 500 bp, Zea mays
ggtgtaagcttagatgcattggtgggaatatttacccgactaggtagagacatggaggagattggcgttagcaaaagctataaattggctgaaaaagttgcatctataatggaagaggcacaacctcttcttacacgggtacattccttcttccaacttttttccctaattgtttgcaaaattataatttagttaccttgttcgaatgcatgtgcaaccagtttctttcagccagtaccgctaaggttgcgtgtttcaaatgccttgtattcccttggcacactactagatattccaaataccagcatgctacctctgcaatcagcaatggctcataccttagtcttagtgatcgctgaaatgttgtagaacagttccactatgcaacatatgttccccgcatgtttatctgtctctgcttttatgagtaatggtcaggaggaggggatctccacttagttggagcgtggtattaggttcttcttcctcttttgtgtgtg

SEQ ID NO: 5973 - DNA, 356 bp, Zea mays
gctcctcgcctcctcctctcccgagtcccgaacggccgatcccgacgccggctgcgtggctcgcctcagagccccagccgtatcctgccacccttgtccatgagcgcccgctatcagcgcagctagtccctccctccgcccgctatcttgagcggtggtgatggagtttactttcgaggatgcagcggaactgtgcgcgctcgtttcgaatcagcaatcccacgtcgacgagaagcggaggtcgatgtggtttcttctaccggcgcacctccgatcagaatgcatttctgtttttgcaccctgcatcacaaaagattcggggccctcttaatttgcaggtggctggagtcaatgat

SEQ ID NO: 5974 - DNA, 1070 bp, Zea mays
ttcgagggtgcagcaacatttcagtgacgagttctcctgttggctcttggtgcgcgccatgagtttgggtcagcttggtctccctagttccatgagtaatatcggatctaatccttttactcttctataacctttttgcttttcttttgtttcttttttctgttttggctatggatgtaagtcctgttttctctctctctaatataaagatgtgcagctctcctgcgcgttctagaaaaaatgaatgtaaaatttgatcttcaattgtttattggcccattataaaattgtacaaagcttctccaaatatgccaattgatccattacaattgtttcataactactgtttatggattttgggactgcagaactgatggattctaacagatgtaacagacctacagtagggatgctaggccaaggagttaaaatatatccacatgttagaatatttcgtaactgtagtaacttcaacattatatagattaatcatgaacttttagttgtattaaacaaataagctctgtatgttcattgttgtagaactaagtttattgtgaatttgtgaacacatatatttgttcatgaaactgcattggatttggactaacaaagtttgtgtatgtgatatgtttttagtctggatctgcccttggtcaagattcaaatatggcttctgcagggttggctcgggtgggtgagtggtgcgactcgtcctctcatgaggctcgtcaccttgagcaacatgccgatcctgcagcagctgcacctggaggaggagctcctgcgccgcacatcggacaactggtgtgtcatcaacgatggcatggcccctgctaccattctcacgggtatgtctgggtataaagtaactaaacgtttctcggatgttttcaggaaggaagattcaatcatgtattggtctccttgtgccccatgttgagttgctaatttggttttgcgtgatggcaggactgcaggagagtctcggagcttgtcgacatacagccggtcctctgggaccaagtgccgattgtgaggaggttcagtggaggtggcacgtcatgtga

SEQ ID NO: 5975 - DNA, 407 bp, Zea mays
actgaacacatctcaacgcttacacttaccatgaaaataaggtcttggaagcaataatttgcatgttattagagccctgctattcaagctccttttcatctcaaattttgccactatctaaaactaaaaaaataaaaaaatcgcttaaagcattcagaatttcagatacacaaagtgagtcgcctcacctgatccttgacaagctcttctctacttgaaacatgtttctggttgcgagccgtagattccaactcgtttacaagctgttgcttccattcaaactgggatgtgattatgagtaccaccaacaggaagacaagcactacaggctttgacaccattatattgtatgagaggaaacctagaaacaaattcatcaatgaacgcactaatatgcagacattgca

SEQ ID NO: 5976 - DNA, 411 bp, Zea mays
  misc_feature (401)..(405): n is a, c, g, or t
gctgaaagtttaggattcagggcaattgttttgacagttgacacgcctgtgcttggcaggcgtgaagctgatatcagaaataagtacagcgcttgtatcgttaatgaaatctcctaaaattgagggaaattatgttcatttacaaaattcataattccagtttcctaacccgttgctactgaaggttaaaattttaagctactatcttataccatatcgtagatcgtcgatacatttatgtggagcattgcagtagcttcaacatcagaatgttgcaaaaaaaacaatccccttttcttttatcttgagatgttctgtaactgagctgattgttcatgcaggatgattgctccacctctgtcaaaccttgaaggtttaatgtcattagacgactttgacgnnnnnctgaag

SEQ ID NO: 5977 - DNA, 629 bp, Zea mays
tatagcagtctgtgctgatgaccctgaattccgtcactacacggacatcacggacctcccaccgcatcgccttcaagagatccgccgcttttttgaagattgtatgttcttaaactgtatccacagcttgtccccagtgttacaatccagatcataaaatgcagtaactagagtccaatcgttatgtttctgccgtgttgacagataaaaagaatgaaaacaaagaggtcgcagtgaatgagttcctgccagcgaaagatgccatcaacgcaatcaagtactcgatgtgagttttcttccacagactctggcatatatgttactactactactctatactagctttgctttgatgctattctatacaggacaataatttgtgttatcagaacagagctcactaaaccagtttggatgttgtactgcagggacctgtatggctcatacgtcatcgaaagcctgaggaagtgatctccagctgcttgattgtggttgtggatgctacaccattttctcaacagctcatccagagtaccgtagtacagacttaacacgaacgaactgtaatcgtgaccaagggatattattaccttctgttcatgttgaaacaatcagcagtgccctttctt

SEQ ID NO: 5978 - DNA, 648 bp, Zea mays
tgaatctgccgaatggaggatgcaatatgacaaagaagtagagaaaaacaggcagttgcatgatgagctttcaaaggtatttctcacttaccagatacttgtacatggctatgcccctcagacactccatccacggcgctcatttgagaattctcttcacaggttaaggcctcattagctggcacagcccggcgtcttgagttgttgcagaaggtatttttttttctgggcgatcaaatttaatacataccctctactatatcatgcactttctaccctgggccacctttaattttttgccagcccttcctcttcgctccttttcattttttaattccctctagtcctctacatgtgtataccccgcttaatcattctcattgctgcaggataacgagttgcagaagaggcagactgaatcgctgaggcagcaatgcaattgcactctccattgaaagttatgcaagattaaggacatggaaggagtttttcagcttctttggcggattagctatttttttccaacaccaagggaggaaaaccagattgagttctaggaatgagaactggcatatgaaaatgattgagaacatatatagtgtatagaccatagtgttcgtcctttataccaatggtgagctgcacagt

SEQ ID NO: 5979 - DNA, 931 bp, Zea mays
  misc_feature (718)..(718): n is a, c, g, or t
  misc_feature (787)..(788): n is a, c, g, or t
  misc_feature (798)..(798): n is a, c, g, or t
  misc_feature (864)..(864): n is a, c, g, or t
  misc_feature (884)..(885): n is a, c, g, or t
  misc_feature (889)..(889): n is a, c, g, or t
  misc_feature (905)..(905): n is a, c, g, or t
agaactggactgtaaaggtaacacaggaattaaagtcctccattcaccatgatttcttttctcatttacgttgttcaatcaggttgcagatttcggtctttcacgtctaaaactcgaaacgtttttacgaacaaaaactggaaaaggaacggtgagtaaaaaaaaaactacttgataaatataaatattctagacactcatctcccgaagagtgttgatgtcataaactttgatctaccgaatctgataattcgcttctctatgcagccacaatggatggccccagaggtgttatgtaatgaaccttcagatgagaagtacgtgcaacagaggcattgttgacattgagcgtcctgtcggttttaggattggcagatactgatccttttgttctttggtaaatataggtctgacgtgtacagctatggggttattctatgggaacttgtgacccagaagataccctgggataatctcaatacaatgcaggtaaattgtctcagtgcattggttaggcatgcacggacttatatcatactactatttggtgcacttgctcatatgtgcactgacttttattttatccttgtgcccctgctcatacaatcaattatgtgacaccgccatgctgcgctgcaggttattggagctgtcggctttatggatcagaggttggacattccaagcgatacagtcattgtagccctcctattgttcnccgtgatttaaaatcgtcaaatttggttggtggacaagaactggagtgtaaagggtagcactgaaattnnaaggtctccnactccaatcgccacgctttattttctcatttatgttgttcaatcaggttgcagattttggtaaacnagtgtgattagcagcccctnnatanacgcgccctttcattngagcagcgaccctcagaaacgcccct

SEQ ID NO: 5980 - DNA, 366 bp, Zea mays
  misc_feature (358)..(360): n is a, c, g, or t
tggagttaaggaagattcagctactgctacatgtgagagagaggtaaatgaaagcggacctactggaattccagaggacgaggaacctaaggaggagggagacacatacatggctagcgaattcagcggagatgcttcttccgaaattcctatggaaacgaaggaaaccactgacatggccgaagaagcagatgcagatagtcacaacgtaactcctgtgggaatcaacaaggaagacaccgacgctgcgagcaacgcaaccagaaattaccccgcgggaaccaagcaggaaggcactcgcgtggtcatggatgtaaacaagaattctccgccgaaagttcatcagaaatcaaggaannncatttc

SEQ ID NO: 5981 - DNA, 479 bp, Zea mays
ggcaagtccgcaagtgcttacactgacattaagtgaaaaacagccatgtctttcattgacatctgggaactggacctttttttcagggttttgttatagtctcagctctccttgtaactgcactgctacaattcgtgtatgatgggaagccaccatcactctactgcctgatggcattaccacttgttgcgacaagcatattcatctaccagaagtatccatatgttgataagaagaagaaagtctgatgcacataattgtcagagatgggaagtatcatcagcaggatgtaatgctaaccttattttgtccacaaggctggaatttgcaccgtcaagtgggccagatgtgactcttgaagagttgcctgttcgtgaatctattttcaattatctactgatctagatatataattaaattagcagtacactagcctggaatcagtttcagcaggcagttgacatgcttgcataataaac

SEQ ID NO: 5982 - DNA, 384 bp, Zea mays
gcatggagcgatgtcgtcgtctttgctgtgcgcgctatagcctttctcgtccgcctgaggcacgcatgactcgtccgtcgattattgtgctgcagtggacatgtgtatgtgctcctgtttctagcatatccccttgctttcaggaagaaagtgaaagtaattatatatatgatgatcgtgtaataattttcgtctacgagggagaacgaccttgtcatgcagaaaagatcaattcaagtggctcagcgttcggattagtggtttagatatatactctttaagactagtcattattagttcatatgccaccaactgtggttgggctgtcatttttcatcatatgtggagagtgagtcaatgtacctagctaggagcgttgttgtg

SEQ ID NO: 5983 - DNA, 397 bp, Zea mays
actggggcccggcgtgtcaacgtccaccgctatgtcggccacctcctcgacgaagtcgtcgtgcttcgccatcggatcgtactgtttcatgaccagcacagatgccaccgtcgagaattccggcagcgccaggtaagtacccaccggcccgagctccgggctgtccgtgctccagtcaaccagcggcatgcagggcgtgccctgtccgacgaggaacaggttgcaccgccctgttgccttgatcgcctcaacgacttcctctttccctcccactgtcctgtcttcatagcggacagagtcgttcccgttggccaccttggttcggaactcttcaaggaacgacgcgtcgtcgtcgctggcggcgccgccggactgtagcaagaagcgtaggacgtat

SEQ ID NO: 5984 - DNA, 579 bp, Zea mays
ctcccgtttgcaggtgtgacttgaaggtggtgagcgacgccaacaccttcttcatcgagaccgtcctggcgcaccacggcgtgctcggctgcttctccgagatcgtcaccaatccggcgagcgtcgacgcggacggcaggctcaggatctcgccgttccacgaccccgcgtccgcgccgcacggttgcagcctctgccctgacaacatgtgcaaggtactacgattataccgacagtactacgattacaaacagcatagttttctagtttaagatgtctggatgcccatactctactttcgacactgatgaaatctctgtgcaatgcacatagtcaacagtcatgtcgagatgcggaaactcaccggtaattcagcaataaaccaaagatgtgctcttaccacgtgcagtgcagggcaagatactggggaggatccaggcaacaggcagtgacaagaagcggcgccggcgcttcatctacatcggtgacgggaagggagattactgcccgtccctcaagctgggggaaggggaccacgtcatgccaagggagaactaccccctgtggcatctcatctgc

SEQ ID NO: 5985 - DNA, 402 bp, Zea mays
ataggagtgcgagggggagctcctagtcgaggcggaggaagaggaggagacgacggaagtggtgctcctaactttggtggagaaagtggaggactagatggtggagcaccctttcgagagggcggtagaataggagtccgagggggctgctgaacaggaggagatggaagaggtacccctaatcgtggtgcgggaattagaggagcggaaggtggaatgcccttatgaggaggaggaataacaggagatcgaataggtaccctaaactgtggtggaggaggtggagtgcccttccgacggggaggaggtactacaggagcacgagccgaaggaacaggaggggatgggaggggtgcccctaaccgtggtgccacaagtggaggagtagaaggtggaacaccc

SEQ ID NO: 5986 - DNA, 809 bp, Zea mays
atgacagaagtttgtttctcaactcattcttttcaatgatatacttactgcatcatcacattttcttataacgtgttgctgacgatatctttccttagatattctgaaagtcaatacgttggaaacacagactttctaatatttcgggctttaaatcagcatgggtttcttggacaactacaagagaggaaactggttagtgcctgattctctaatcttttagtaacttggatattcgggtgtggttcatctatagtcttctcatacacttaaattttttgaaaccatctcatatggttctaatcgttaaaagttccatcgattcagtgtggtgtgatacagttaccgtcgcaaactctactactttcaatgtatgacaaaacaagccgtatggttggcatgctcttccctaaggtaatcctaactgtagtcaaatgtacacatacctatatcatgcatttactgaaatgttgctcttttccatagaacatgctgatgttcaggccagaggccttaactcagccatcaccagtgcagcaggaagaacttatacaccaccaacaacaacaactacagcagcaacagagaaacatacatcgtcttcaacgacaactcatacagaagcagcagcagcaacatatgcagcaggtgaccttcttaattatagaccatttccatttgctaaaatattgccctttttgctcggaacatgatggtattcaaatcgctggtctcaacttcaaaatctgcatttgctgaaacagaagctactaccacaacgacttcaataccaagagcagctacattta

SEQ ID NO: 5987 - DNA, 857 bp, Zea mays
ggtgatttgttgtcccctctgagctttgtttgtgtgaatctaaacaatcggccatgcaattgactagagtaccatggctaccaacatgttatctgtattgaatatggaatatggttttgctcttttctgttgatagtttcacatgaatgactagatgaaccgatcatttgacatgaattcttggtgccttacatagttgtgctttgctttaggtgaacaggtcaaactagaagtaatatagatggtagatgtgtaaattccttgttccatcctctgctactttgatgcagatgggtctcgatgccgtggtggccgcctgctacgtctttctagtacttgtctctgtgctcacagttcgcttcttctacgtactgtggcaaagtggccaaccagagtcaaggttgtgcaccaccagattgcgttgtctcaatgtccttggctccggtgagtacgtattgcagtcttgcctgtcaaataccttatggacaagttttagatatggttgcctggtatataaaacggtactcatacgtgtaagctcatacggtactcatacggcaaataaaaacattctcaatctgggtagtaaaattgtctataaataaaaacattctaaatctactaaagaaaaggtccagattaccagctccgggtgatgctgatgagctatctgtcattgaagaccaaattgcatggattgttcacataattacatccattgtcaagtaaggcaggtaacaggtgttaggtgagcaatatattttttcttttatttgtaaattttgttcttttaaatgttgtccttgcttgctctacatatatgcgattcaggaagagcccgcagagaggtcgaggag

SEQ ID NO: 5988 - DNA, 404 bp, Zea mays
cctctttgtcgggcaagagctcttggcctctgtggattatcagcctgattcacaactctctgcaagaattcgagcgcagatgggccaagaaagcgcggctgacgcgattcctggtttgatggtttctgttggtgtttcgggctaacagactctctttttttttgtttacttcctcaaagttccacttcaacatgtggtttctatggatccgggcttcccgagttggaatctgatcactcgcgtcagtgcttcttagcttccttcatttgccgtcatggaggagcagaactcatggcttattaggaccaagttctcccatactgtctacactagagtggatccacgaagagtagcagctgttgctccggtgggcaaagatgtggtgctgccttttgctccgctta

SEQ ID NO: 5989 - DNA, 791 bp, Zea mays
  misc_feature (740)..(740): n is a, c, g, or t
ctcatgctttctttacacacatttgagaaagaaagaaaataaaagaggtcatctgatactatatatggtatttgtccaaggtccttgagaacttagacattccagaagagctgagagaaatgttcatttctattccggaggaaaagtttcgcatagatatttcatctactgaaataagaaagagccaagggctctgatgtatcaagtggtcgtattctacagcagatttgggatgattctccacgactatagaaggtacaaatgaatcttttcaaatagctcgtgcgatgcttaactccccgaggaatccacatgtatattagtaaaacacatagcactagcattttacatatgagaagacattgaatgatgtatactatgttaatcctctatttttttccatagacaatcaggcaatgttagctagttttcttgatgagcccatattggatactttttatatgtgttgtacacttgtacttaaatccgtggtatcacaattgaaagagaaatcagtaaatcaccattcaattcttgataacatatgctttgttgagattacaacattagtgtccatttcatattgattgttgaaatcctgaaaatatgcttgtaacacattgctaggtacatttggatgctagcagtcaagtctgaattctccaagcttactttttcacatttgtggggttgtattcacgcattctattgcagattatgataggtccattcatgcatcnttgcaaaggaactgttgatgtattctcagggagaatattttatttaacttt

SEQ ID NO: 5990 - DNA, 515 bp, Zea mays
ccagtggtggtactccgctttccacaatgtcacggccatggtcggcgccggcgtgctcagcctcccctacgccatgtcccagctcggctggtccgtccgtcgtccgactcgtgctctactaatcacaccatcgatcgatcgatccatcagccatcatccatcatccatctgtcgatccggttctcaatctcgacggatcgccttgcagggaggtcggcgtcacggtgctggttctgttgtgggccatcacgctctacacgctgtggcagatggtggagatgcacgagtgcgtcccggggaagcggttcgaccggtaccacgagctcgggcagcacgcgttcggcgagcgcctgggcctctggatcgtcgtgccgcagcagctggtggtggaggtgggcgtcaacatcgtctacatggtcaccggcggcacgtcgctgaagaagttccacgacacggtctgcggcgacagctgcacggacatcaagctcacctacttcatcatgatcttcgcctca

SEQ ID NO: 5991 - DNA, 388 bp, Zea mays
ttgtttgtcattgttgatatgaatatctggtatgcatggactgactatgttttcagtgattgcctgtcaccgttggtctgaatatctggtgaacatagatatgctcagtgacggtgcttgtcattgttgttggtctggatatttgggttcgcaaggatatatttgcagtgctgagatgcaagtgcttaaccgaactgtagccaaagtaaccctatgctagaagtagctggcaaccatgttgaattgttaatctcgttagtttttttttctggggtcttgaaaatgccctccagatctctcacgcgaacgtgaacttcacctatcttctctatcgagctgcatcgccctctcttttggcgagcaggtctttggattcaccgtttgcttg

SEQ ID NO: 5992 - DNA, 406 bp, Zea mays
ccttattgcagtgtttgacctgggtggtggcacatttgatgtgtcaatccttgagatatcaaatggggttttcgaggtaattttcttctcatatcttgcacagattctctatgcagatgttgaaattggtgtagtaattcttaattctgacaccttgttcaggtcaaggcaaccaatggtgatactttccttggtggtgaggattttgatggtgcactgcttgaatatctggttagcgagttcaagaagtcagacaacattgatctgagcaaggacaagttagcactgcaaaggctcagggaagctgctgagaaggccaaggttgagctttcgtccactatgcagactgaaatcaacctcccatttatcactgctgatgcatctggtgcaaagcacttcaacatta

SEQ ID NO: 5993 - DNA, 693 bp, Zea mays
gcaagttgcttgggtggtaactaattttcttcgaggagctgattgggtggtaatgtcttgatgagaagtttcagggattccatgatactggcaaaagagggtcgtctccagggctccctgagtaagcaattaaaatggtccatcaaaacaagttcgatggttgagtaatgagaaaatgcataatagcacgtatgttagtattacacctgacccagcaggactcgattactgccgccactttcggatcaacgctgcttgggatctcaagcctttgtcccttgaaaccaaccgctgcaacgacctgcaagtaaaattgtacgtattttttaacaaaaaagagagaacttaaggattttctccatggggtatatctaaagctagaaaacgtcaatgtgatactgtgatgcataaagcatgagatgcaaacctgagctggatttaaattactccatggctgctgcaatgtcataagctcccataagattacaccgaagctgtaaacatcagacttctcatttgagggctcgtctcgtagaacttctggtgccatccactcaggctagatagcatggcacagaataacacttagccacatagaattgcgtaacaaaacaaaatacactaaacggaacaatataacttacagtccctgctgcagtcttggaagacagaaatgtgtttgccttcaatctg

SEQ ID NO: 5994 - DNA, 679 bp, Zea mays
ccggttaatgctgcaacaggagtccaaaggcgccagagtatacaggaacggattccattgtgcttcccaggtgttgatcttaatatttcatttttgatgtttgtgctattaggaattattcctggtaagaagttaagaacgttgctagaattactttctataagtgcctgaaagcactgcgaaattgttaagctacaacattagtagtgaactattgtcacaagatgagaacaggaatgttacaaccgaggagattggaaatacaataccttgagcgccaacaacatgaaggtattcttctgatatttgtttccattctcttggtttgcaggttgtggtgacagagggtgtgaagtcactttataaagggtgagaactgcatgtactgcatctatatgttttatattataataacagtggtcgtttactaatcagcttgatttgttcaacatgctgtctctattttcagtggatttgccacattcgcgagagtaggccctcagacaacgattacctttgtcgtgtgcgagaaactgcgcgaacttgcaggaatgactgctatctagtgccaccccaaattgcataatgtgtggggtccaacggttgaacagcatactctacccgagttttcacaccattctttattcaccattcatgatgagaagggagaagataagca

SEQ ID NO: 5995 - DNA, 826 bp, Zea mays
ggacttgaggcagtgaactttataacagttgcgtcaccgcatcttggttccagaggaaataagcaggtacctagtaacatcatcgcattcagaaatgaaaaacaatctatcatttcttgtatggaagtacatgcaaattggtgtaaaaaataactaactttgttgagtgataataatagtataatagcttcgtctacagaatccttttagtactcataacatgtttcttcaaacgcttgattgaaattttatcttgtttcaattatacaggttcctttcctttttggagttactgcaattgaaaattttgcatgctacatcattcatttgatatttggaagaactggcaaacacctctttcttactgacaatgatgatggaaagcctccattgctacaacggatggtggacaattggggtgacctgcaattcatgtatgcttatcttcgacaactggtttcatgtgcctgggttgtgaatgcttatagcttattaatgtattgttgtaggtctgctttgcaagcatttaggcggcgtgttgcatactccaatgttggtcatgatcgtatccttacatcactcctgaaattagcatgcagtaataagccttgtttaaagttttttccataactgaatgttgattaagatattgttgggtggagaacatcatctatcagaaaagattctgaactacccaaggtaaaccttgtgtacttttcgttgtaacatgtgttggtttggctgacctgtatatggccttttctttcattataccatttctaatctgcatttatgtattttccagtgggttgattcaaccaacaag

SEQ ID NO: 5996 - DNA, 353 bp, Zea mays
agtaagataaataatataaacaacaacacatccgcaaatccgcaaaaatgaaatgcattctcagaattggtaactgacttttagaaactagtataattgaccaaaagctagtacttacaatgcatatatgattacgatagtcaaaccatctctgtatttgaacacagctggtaattgaagaggaactgacgagtcagaaacagaatagggttatactttacataatcaggtttctgagatactcacagagatctgtatttctcattttctgcaaggcgattgagcacatctatctcaatcattgcagcatcacggtacttgcggatactgcgaacaacttttatggcaacata

SEQ ID NO: 5997 - DNA, 369 bp, Zea mays
tattgaccttctcacaggtcaagcccggtactcaacctggtcagaaggtagttctgagaggaaaaggtaatctactgtgcacgcttttgttcttttttggcggtgcattatctctttaattacggattgtaacacggctatgatgcgtctgtgaaatgattagtccaaaaggtttctggaacatagccatgtcagagattgttttcttgtgtggaagtaacaaaattatgaatcgatcgaacaatcaaattctactgcatgtgtcaagactggaaaatttatctggcgtctaggtgaactgccaatttgaactgaagaagctggtggaaacttgcatgctttatctaaaccctgatgcatctatcctgc

SEQ ID NO: 5998 - DNA, 241 bp, Zea mays
gtctcaaactggaccgatgactgcgatacagcgatgagcgccgtgttcagccagtaccaggagatcgacatctacaacatctacgcgcccagatgcaacctccctccgtcgtcagctgcacttgcacttgctgttgacaaggcagtcgtagccaacagacaggtgagccgtgagcggctgtcagtgtcagctcgatgtgcacgctctgttctggtttctcaactcctgacgtttttttttt

SEQ ID NO: 5999 - DNA, 395 bp, Zea mays
ttttggtcatggcagctggccagctagttcatcgcagtcccgtagtggctgagcacagttttccttggtaacaagttttcaattggatagcactgaagaactagggctagtgtaagaatggaacccagattataatttcttggggcttttgatgtaaatgaaggcctagcattccccccttcctttgtctcatttaagaattattaagagatgactgtgagcaaacatcttggagcgagctttgcaaccaaattaggccaaacacaagtgcaagccttcaagaaaggaatagcaatgagtgttttggggaaataaatctttttcaatattttaggtagagagattgagagaacaattgttgtatttgcaaacccactgttcgtgtacatactgga

SEQ ID NO: 6000 - DNA, 688 bp, Zea mays
catggagacaattggaagctgttgttgctgccaaggctgctggagatgacatggttttggtcaactaggtaatataacctttcgcttcatttatttgttagtgcttgtgttcgtaagtttttctagtcttgtatcctaaaaccgtactactctgtttatgtcctcttgttcttgctttgttttagcatatctgtgagatgcattgccactttttgtactgctcaccttctgttttgacttggtcatggcagttcacaaaaagatggaatatatctgtaccaaagtttcaatttattatggacatttagttcttagtaatgtcaatcagaccaagcatccataagtatgcaaacatcgtttgaaaggatgtttatgctttctcagatgatagctgctcacttatttcatgagcgtcatgtgcgcttatcgaggcaacaaggtatcggtgctagttgcggtgctcttatatcaacattgttgacttgggactatcagatccatgttccttgcatcagtgcaaaaaaatgcggaccgagtttgaacacattggcggcagcgaaagccaattcatgcagaatttctttgcctagtgagatcctgctgtggttctgagcccttgctttattcagcccctccttttctgttgcgttaatttatgaataattggactcttgtgttaatccttcag

SEQ ID NO: 6001 - DNA, 887 bp, Zea mays
ggaggtctcgcagcactccaaatacttctgtgagttctgtggcaaggtaaactcatcgattttgtgatgccttgctttgataatcacatggcaaactggtcaatcatttacggtgcattagttgagtaacagtttttttttgctatttttaagatgcactattgcttattttttaaacaattatgtgctattgactaattcctgtgtctccttttttgtggtaacaacaatgaatagtgacctggtgaaatatgttctccgacatttgcaatagcaatctgtgatcgtctttctgtctttcatatagctgtattgatgttataacttctctgagatagtttatgccttatctgaattctactagatagtcggttaatgtcaaggcatacgcataccttgccagaccttttctgggttttcactgttttaatgaaactcctttatgaattatgtgccatgtttctttctatttgcttttttgattcttacttgtgccattgccttttgtatggccaatacttgacaacagtttgccgtgaagaggaaagcagttggtatctggggatgcaaggactgtgggaaggttaaggccggtggcgcctacacaatgaagtatgtgatgatgtccggttactctgtttatattgaatcctcgtgtgttttctaattttgttactttgcatttccagcactgctagtgcggtcactgtgagaagcacaatccggcgcctgcgggagcagaccgaagcatgattgcgggcagcttgaaaaggagtacctggatttttgtagttcagccaagagccgtgaaccattttgcctttttagctaaatgaacaagaaatgtttatctatctgtagtgaccactttgtactcatggttgtca

SEQ ID NO: 6002 - DNA, 374 bp, Zea mays
tcataatccgcgctgtgtcctatgcgcctcatgcccagaatctggactacatctttttgctgaatgttgcttcaccagacatatttgggctgatttgagtatttgggctgcaattacggagatccaccattcttcttggcaacctgtagattcggtgcaccaatggtggtcgaatcttgcaacatccgcagtgagaagcgtgaagggattgcgaaccctcatcatcctcgtgtcttggacaatttggtgtgagagaaactcgcgaatctttgagcacaaagagaagaccgtgacacagactatagcgatgattaaggagcaaatccgcctgtggattctaggaggagcaaaacacttagcaaggctggtgtagg

SEQ ID NO: 6003 - DNA, 365 bp, Zea mays
tatcaacgatattataaggataaatgtccgagttttctttatctgacatgttaaatgaatgtatctcagaggtagagaacacttctattgttctacaagtaggcagctatataacaattgacagcaaatcatgaagaaattaacagtgccatccaacagaacttctctaacacaatcagaggactggagttagtcaacaacctacacaacgtaggaatataagcttttctttatcagaatggaaggaaatgttcaagggaagaaaagcaaacccaaatggaaccacgaatttctaggaatgaatttcacccatggagtaattatttgagttataatttgcaggtgttcaaatgcatgataatgga

SEQ ID NO: 6004 - DNA, 395 bp, Zea mays
  misc_feature (385)..(390): n is a, c, g, or t
ccatgcagcagcaaagagcgagtgtaaatggaagcgagcctctcgacacaactgaagcctcagctcctgcaaggaacgctgaatctggatcggtcggcaggggcgtggggcgaagcagctgtaagctttttggtttctccctgactgagaagatccttggaacagatggtggtggtgtgaaagaagggaactacgaagtggaccgtcaaactccccgggtgctagacttgtttgggcacggttctacgcctggtgctctgcatgctctctgtgctgctcccttgggaatatgatgctgttctgcctagttttacagcagttagaattatgtaatctttcagccattttcatcgcgttgtacttgaccaatatgtccagcgtatgnnnnnncagtt

SEQ ID NO: 6005 - DNA, 370 bp, Zea mays
  misc_feature (359)..(362): n is a, c, g, or t
gacgcggagaaaggtggcaaccatgacatggatgatgaggagtacctggctcagttcatgtgcctgatgtacgacaaattgttccgtgagggtgtgactgtggatacagctctgcagcaagctctccgctcgcatcccaagttaaagtacagctgccacttacctcacgttttgtagttagggacattgacaaaccatacaggagtatagcaaaacggacatggacaacaggaaatgaataaggattgggtggattcatagtggggttatagaggtttatatcgtgttcgttgtgcaggcgtagtgacagagggtacccccttactgaatctttgggcgagaaagcctatgtaaacctnnnntgctcatg

SEQ ID NO: 6006 - DNA, 421 bp, Zea mays
cattgcgaccttgggtggtgaagaccatccacagagagatggttgaccagcaggtgcagcccagcagggcgacctattgttgtctcctgcacgcatacaccagggcacgctatggcgaggatgccatggccgtgtaccgactgatgaaggatgaggcaatgggcatcgatgtgatgctgtacaacatgcttctgtccatgtgtgcagacattggctatgttgacgaggctgaggagatcttcagagacatgaaggcgtccatgggtgcccattccaagcctgatagctggagctactcatcaatggtgacgctgtactcatccactgccaacgtcctgagtgcagagggcatactgaatgaaatggtggaggccggcttcaagccaaacatctttgtcctgacctcactcatccaacatgg

SEQ ID NO: 6007 - DNA, 388 bp, Zea mays
tttctgaaaagaaatggattgaagaaacttcttccagaattttccctttccgtcttaccctccctcgcaagagaagatgtgtcccatcaagttccagcaaatccaacggcctcagttacattttttcaagtgggaagccacaaaagggcagatacgttgacaataacagtaggaaaagcaggtccctcactagagaggagatactatcagattgtcacaagctggtgaaggagcttctttctgagcatgaatatggattcaacatcggaattttcaaacgccgtttttcccaggagtatgggtacgagcttgaacaccggaagctagggtatctggaccttgaaacgctgctgcatattatgcctgatgtaagggtgaaattcccaag

SEQ ID NO: 6008 - DNA, 500 bp, Zea mays
tcagtgagcctttaacttccatgtctacggcttgtggggcttctacctttgaagtttggatgtcccttcctaagtgggcagcacaggttcgtttctgacattgtttgcatataatatgcactgactagaattatgctgttttgatgtgatcttgtaaatttttttttcacttatgcaactctaaccttacaaattgaaccagtaatgttcaacctaacattctttgaatgtttaggttctgaagcatctagcgccagatatatcatacaggagtttggttgcacttggtattggttgtataaatggtactcctgttgcttcatttgagaggcgagatgcagaccgtcttcttttcttttgcacaagccagtgcaaagatttggctaatgaaaacggtccatattttcatctgccaagatggtcagcctcccttaccaaggacagaacaaagttgggttcagaatcaaaacaaaatctgttgggtgcaaatggagttttgg

SEQ ID NO: 6009 - DNA, 384 bp, Zea mays
tgggtagtgtcgagttcgcttccatggttgctgcattgcttgggctgtcacagggcatcgcgctgctcttgtccaaagggctactcttgcttggtgattatactgcgtactacaaccaatacgccgttgggttctctggtgttctgtttgccatgaaggttgtgctgaacgcctggtcagaagattttgtctatctgcatgggatggtcattccggcgaaatacgctgcctgggctgagttgatcctcatccaggtcttcattcctggcacatcttttcttggccatctcagtggaatacttgctggattggtttacctttggctgaagcgggcgttgaatgggccagatcccctcactcttctggtgtcaagcattaccaaaa

SEQ ID NO: 6010 - DNA, 747 bp, Zea mays
  misc_feature (660)..(662): n is a, c, g, or t
  misc_feature (668)..(669): n is a, c, g, or t
  misc_feature (700)..(704): n is a, c, g, or t
  misc_feature (714)..(716): n is a, c, g, or t
  misc_feature (718)..(718): n is a, c, g, or t
  misc_feature (726)..(726): n is a, c, g, or t
  misc_feature (728)..(732): n is a, c, g, or t
  misc_feature (736)..(737): n is a, c, g, or t
gagagtcgttctctgtaagtgcaaattgtcgctgcattcttctttacttatctcctcacaagttcagtacacaagacagaagaagcgctaacgttcacgctgcattcggatatgtcaggtgaaatgcagagtgagaggagacaccggaccagcttgcaacgctgttagaatggtcgaccatacgatcctagggatcgaccacctctacagacgatcagtttatgcgtgcacgaaggtttgatatgggatgcgatgcgacacggacatctcagttttctgctcccctgtcacaaagctcaaataagaaactacagcagggatgcaatatagattatccagagaatgggtctcttccacctgacgctccatcgtggtgccaggcgccatttgatcctgaaggcctcctcaggtcagtgattcactagctccttttggtcgctgcccataagcctttcttgcaatgcaagttcatatccaatcgagtgttagttcttactgtcacttgctcgtgtttcagctccgttatggcgattgtcacttgcttgaccgggctccagtttgggcatgtaattatacatttcgaggtataatgaatgatggtctgtgatactaaggttgataaattgttcctttttagctgtgtaaaacattcttacattnnnctcccnncgctaaattttacctgcagagcatcgaggannnnncaccagttgnnngngcccttcntnnnnnatgnnctacactctg

SEQ ID NO: 6011 - DNA, 508 bp, Zea mays
taagtgtagaacaatttttttgccgttaacatagtgtataacatttgatgtcgtaatttgttttggaagaaaatttaatttcaacatagaatttttttaccgataggtttatggtcttttaatatctacaggttgtggaaactgagatcattgtaactcaaatgagagcttggcacttagcatatagatgccactagaaccaatttggaattactgtgaggtaattttatatcttgttttgtaagttggagaattaatagctagcatatgcttccttaatgatgttttctttttccatgcatcttcatattaccaaacccttttcttgtaggaaaaacggatatagagtgataaaaggcattaatgtaagtactacataaatgtactacttgtatttttcaataatcaatgcttcaaaagtctatatatatgctgactggtgtcagggttttcccattattgtaagtttgttacaagcaagtgctttccctcacacaacttcaccttt

SEQ ID NO: 6012 - DNA, 994 bp, Zea mays
attatgtcgataaaggaaatctagaggatcatcggcaagagggatctgtagaagattcactggcagatagttatgaaggtaataatgacagatagatatgccataattttgcatgtgtgggatttgccctttttttctataacaccggataaaggtgtacgagtgcatgtaagagttgcataaaggcttgagaagctggcaactgaaatgctgctgaatgctacctgttaatttgtaagcttagctaattacaaaattactgatcggagtaagatgtgcactgcacatctaactgcagtcggtttcctgctatagctgtgcattaagacatctgttattacagaggtgatgatccgtggccttacacaagtggcctgggaacgggtggacgtatgctttcataagagttggctaagatacaacgcccataataacatccaggtaagactaacagcctagccatctgcggacagttattttagtacagtcgcactttgcattcatacttttaaccatctggtgattcatgctacaacgaaaccaccaatcaggagttcagttcaactgctaagtaatataacaacttaaatgctgtaaaaaaaaatgacaatctttctgttgggcagctgagaaagaattgtatacattgttattgctactactacctgatcagtagctgtgaacttttcccttgacgtatatgacacttccttgttagttagtaacagatggaacttccctgtatcgctacataatttaccttattgcagaaaggatatagggttgtagtttcagggaagtctaagcacttcttttggttttactatggttgcaggttaggatccatccaattaattcagatggagaagacgtcatataccatatgatagacaattttgtagtgtagccaagtactccggtgaatgccaactacgtaaaagattactgctatttccagtggattcgccttgggaggtcattaatcttttaccat

SEQ ID NO: 6013 - DNA, 1431 bp, Zea mays
  misc_feature (1381)..(1385): n is a, c, g, or t
ttgctgcatcaccgcttccttacatgtaaaactggaggaagtcgaatctttttttgctcagtgtggcaaggtacgctacatgtcttttagcactgattgttgcacctaaaagtaaggggtaaaaaactacaaccatcacaggtgtcagcagaacttatgcaaataggaaactgatatataagatagataaagtttcctattgctattagacattcaatattgttatgattgataatagcgataggttccctcatcaaccaggggttgtttctgtggcagcaggctttgaccatgctggtcttttgagaactttgatttgttcttggttgatccctaaacaaagactcggctgcgtttataagagaggtcatctagctaacttagggaactaggaaactgacctctagattttcctaatacgaactgactagataacttacctaacctaacttatgtctttccataaaagtattgtagagaacaattctttgagctggaaatgtactgtatgaactcacatccttgagtttatgcatccgaggttaatatgataaattggtgtcttaggccattaccattcgaatactagatgttcattgatcttgcaatgtgaatagtaaatactgctaatagtatttgtatttgtactatttgcattacaggtaaatagtgtgaggctacctcgacatgtttctgacaaaaggcatttctgtggcactgctttagttgaattttcagaagaagatgaggcaaaaggcgtttttgagaaaaatctcatttttgctggggcagacctggaaataagaccaaagtaaaccaactactagttcaatttatttttatgaggtgccatctattaattagaaatgttgcgttcatgcttttgagtttcgacaacaaagttctttttatcttgaaaacgccctccctccgctgcatttactaaatgattggggagtttgatcaggttctcattcacaggccactacgcactccccaaaaatattcttctagttgttgtattgattggttttggtgagaatcttgcctttatggttgcagttcatgtgacaaatgttaagctgtttgttcttgttgaatgattccaaaatcagctcctattattttcagaatttggacttcattgagttttttttatacttttgagtttatcttatgacaatgtatatcatgtatcctattatgaaataatgtaggaaagaatttgatactgaaagagaggcaaagaaagaagcatatgagaagtcacatcctaataagagcagtcatggtgaagggtaaataccctttatctaatttgtttcttatttataatttatttgagtttcaattaacatcgtgatacattgatattggctannnnntatccaaaaggtctgattctggccttcaagctgaagaaaactgcag

SEQ ID NO: 6014 - DNA, 412 bp, Zea mays
agttctcttcgcagatgaagccgccagaaagatagcatgagtgatcatttgttcatccttcctgcctgatccgggaaaccaaaaaataaggggtccatgtccatgatccatccacagaatgtacattatgccataacttgtagcagtagtaccatctaccaatggatgatagcacgagcagttaactcatctaggcagccatgtcttggttttcatcacaatggtccctcagtgcctttgcatcctctttttctctttcaccaccaattcaccatatggatgtcagttgtcacagctgtgtgattggctggaggtatcagctgaactgaagtagtagtgacttgtgaatcttttgatacagggcatgggcaacgcctgacagagtgaccggcacaagttcacagctgatata

SEQ ID NO: 6015 - DNA, 470 bp, Zea mays
aagttcatactcagcatctcgttgttcctggggctgtccatcccacagtacttccgggtctacgagatgttcttcggcttcggaccagttcacacccattcagtagcggtacgcgagctagatgcagtagacgaaataaattccattaagctctcacatcctcacctctcttcctcctacttgccgttgcagttcaacgtgatggtcaatgtcatcttctcatcgccggcgacggtggccgccatactggcctaccttctggactgcacccacctgtactgggaggctagtgtgaagaaggacaggggctggttctggtgggagaagttcaagtcctacaagtatgatggcaggagcgaggagttctaccgtcttccttatggcttgagcaggtacttcccctcgctctaggacgccgggaggaagacgacggacccaagttctatgtagctgctcgagcgtagaagctg

SEQ ID NO: 6016 - DNA, 393 bp, Zea mays
gcacataagatctactgatttgcatatatatacacagatcacagacacagcaccaccacttacgcacgcctaatcacctcaccaatgcaatcccctagcttctttcttagtagcatccaaaatccgtcctcccctttcaatttgtacgcacgcaggtaggtacgtacgtacacttaagtctcgcaaaattaaattaacgcatcgatcgatccatcgagagtggtcgccatcgtctcgatcgatccatcgtcgtcttgtagtacaaaaggaagaccacgcgcgcgcctgcatgccggcccgaccgcccctccgccgttggtgatcacgtactggtcatggcatgaagagcttgttgccgcacttgcagcgccacacctccgggtagtactccca

SEQ ID NO: 6017 - DNA, 440 bp, Zea mays
gcagcaagtagttgcacgtacgcacgacaaccacaatggccgcaacaagctggtacagggcaaaagtaaataaagcaggataagacacgacacaaaagaagcgttaagcactcacatccatatcggccatgtatgaataacaactttagtcgccacaaaatcttgaccgaatatgatagcccttgaggcatgtgcttctgctccactccatacagcaacggtggttgtcaagctcaaacagagaaatcacatgtcgtcttgggatttttctagagctgccaatcgatggcagacagccccagcttctctaagatctcgtttgttttggagaagtgcctgggaatcatgaaatcagagtagcacatgacagatgtatcaaggacaatcacatcaatagctactcctagcacctctcatttgtttggattcggcccacataa

SEQ ID NO: 6018 - DNA, 380 bp, Zea mays
gtcgcactaacactgattttcgctatccaacgatgtgacccagctccattttatctgttcgacgagatcgatgctgctctggatccacaataccgaacagcagttggaagtatccttattgtttgttctagtgtctagctatgcacatgatcaatgcctcttctttgtgtgtcaatagtcctgctgctttccttaagtttcattccagatatgatccgccgtctagctgacatggctgacactcagttcattgcgaccacattccggccagagattgctaaagtggctgataagatatatgccgtgagacacaagaatagggtgagcaacatcgacgtggtgtccaaggaggaggccctggacttcatcgagcgtgatca

SEQ ID NO: 6019 - DNA, 701 bp, Zea mays
tatctgcagtccgagatctacagccacatgacaaaccctgctgactctgttttcctctgacacgaccatgagaccagaagctatccccagcttgggtaaagtggcatgcgagaagaatagggctgctgttgctgccggctgtttgcactaataaagccttgcaggaggctctgggcagcttttgcttggtccagtgtgccctggatctccaccacagactcagaagaaccagcatgagcctcatgtagcctcagtcttgcaccagaaacctgggggtcaagtagaacattaatgagaaaatctattactacctccatttttttatttgacgctggatagttcaactttacactaacaaacgtcaaataaaaaaacagagggagtacgtcataagaggacgcattccatttagcagtgctcgtggaagagaaaatctaatcataacagaggatgcagttcatataccagcgcccatggaataaaaggcataatgagttctatacctgacggatctctgctagattgaccccaccagcaccgacgatagaccccaaagaactatttggaatccttagttcaatagtgctcaagaaccttctgccaaaggaaggtattttcaatgaaatctgtacacgtaaaattaaaattatgtttaagaaggaaggcctccggtcatacccggtagcacttgtcggttctct

SEQ ID NO: 6020 - DNA, 395 bp, Zea mays
atgtctgggcgcggcaagggcggcaaggggctgggcaagggtggtgcgaaacgccaccgtaaggttctccgcgacaacatccagggtatcacgaagccggcaatccggaggctggcgaggaggggcggcgtgaagcgtatctccgggcttatctacgaggagacccgcggcgtgctcaagatcttcctcgagaatgtcatccgcgacgcggtcacctacaccgagcacgctcgccgcaagaccgtcaccgccatggatgttgtgtacgccctcaagcgccagggccgcactctgtacgggttcggtggttgagcgcatctcttccctcgtctgcagcggctgccggtggcgtttcctcagttccctctgccttgcttggcttgatgtagagagta

SEQ ID NO: 6021 - DNA, 637 bp, Zea mays
tcctttgtttcttcaaaagatgaggtaattcagtctcttacgtttctcagtgccttacttaagttttgtctggaatgatatgcaagagtatttattgatacgcatcagttatccgtgtttaggctgcacaagggctaagagagagtgtgcaaaagctcaaagttttgcatggttccggtatcactgctctggatgaattagcaggtgaaatcgacatgaactcgcggacaacatttgagagattaaattcacagatacagtcacacacatcagcccttgagaacgtaagttcgtttccgttggcctgatgtgaacgcagtgggtttttgcagcatttctgactgtttacttctgttctaagtgtttcggaggaatcgcttcggaagcagataacttgttagatgagcttcagcgcagcctatcgaaacaagaagagaggctagcccatttcgcagtgaagcagagggaggtctgcatcttgtcgaagcatggagtcattttgctattctcctacgctgcttcggtgctgtaacttttgttgttgctgggggtgcagggacacctgagagctgtggaagcgtcacgttccatctcaaagatcactgctgggttcttccactcgctagatgtccataaa

SEQ ID NO: 6022 - DNA, 131 bp, Zea mays
  misc_feature (14)..(14): n is a, c, g, or t
aatcatgattgtcntttgtccaatggtttcaggcagttcctttatcgtatttcctctgctgtattttccatgcaatatcttgactgatgtatgctcatgctcaacacctccaataaagcgagacatgctat

SEQ ID NO: 6023 - DNA, 559 bp, Zea mays
tatacaccacgtgtgatctcacaccgtggggtcatcccttgcccttcaagtcaccacggataatgcggagcgcgattcagttcatttccaaccggtggccatactggaacaggacagagggagcagaccacttctttgtcgtgccacatgactttggcgcatgcttccactaccaggtgagttgtagagccataacaaaccatgaaccatcagatgtactgccagtgcagtgtggaatgaacctagcctggaaactcatataacggagtttgaaatctttctatcattctattcatgtttgctcatataggaccattcgtctaatgtcgctcagcacacccattgttcaggaagagaaggccatcgagcggggcgtccttccgttgcttcgccgtgctacactggtccagacttttgggcagaaggatcatgtctgcctgaaggaaggctccatcaccatcccgccatatgctcctcctcagaagatgaaaacccacctcgttcccccagggacccctaggtcgatcttcgtgtatttccgcggtttattctatgacac

SEQ ID NO: 6024 - DNA, 375 bp, Zea mays
aagagttccaagtgcatcacttttttttagttgccctcatgttatgagattctaatctctatccattcaggttggcatgtactttttgacttgcgtgccatatttttggctttctctatgatgtccaaacttgcattggtgtaccatcagcttcattcaagaagtactaatagttgatacctgaggctctgagttgtacgtgaaatgtctgttcttggagttaggatatgctcggatggcaaatgaatggccttgcctttacactcttgtccttgatgcattactggaccgctggtagcatacatgacagacgtccgtcttattgtgcgcagataagacatgggtcagattttgggttagttcaggttgatcagt

SEQ ID NO: 6025 - DNA, 686 bp, Zea mays
tattggggacaagtttgggatggttctcaggtttctgctccgtacatcttcacccttgctgtgaatttaactttcaactttgttgcctgccacttctcgcccagtcacagttactttacacatgcaaatattttatcggtacctatctcactaaataaccgaacaattacttatacttcttttctttttgttttgggacattgatcttcgattgcgttattattaggttggtaggatatgttgtcattggaagtcaacaaaaaaattatatgaactggctacaggtttgcatatctccatcttgtaaataaaaaagaaaaatgcctgcctcaccctgtcatggtggcaactattggacgcgtcttctttaaaattatgattgaggtctcatgttcctgcagagtaatattcttttgaataattgtgagaagtattggtatggtgcttatagacaaataaagtccatctcgtaagtatgctttgttctgtgtctacatttattcttttttacatgtgtagttgtgtccatattttgcagattgagtagctgagaatattgtgacaacgtgtcattccatgcatcaccctgtttccatcttttgtattatataaaactaagttgaaatcaatgcaaccaactgattgactttaccaatcttcattgatccagatcgctgtcaagaggt

SEQ ID NO: 6026 - DNA, 1307 bp, Zea mays
tgtgattttgtattttgtttttgctgaagtttttaaaatttactcataatgtgttcatgtattgactgcagcaccatttttttgttgtcctgcgacaaatgctcgaagggaggccagaagtatcagaattgcattcaattgaaggagctaaggttccattgatgcgttttaaattcaatgggattttagttgactttccttatgttcaactcccagtgatcaatgctgcagaggtaagcatccggtcttgaattagtgtttgtttactacatatataataaacatgttatatttgttgattcatggaatttgtatttctactctcagaatatctttttttgtctgcacaccctgtaacactgtttcatcttggtcatgctgtaccttgataagctattgctttctagttcctacaacttttggtagcattcagtgagtgcctaattcttaagaccgagaaatttcagttcaccaccttaataaaattgtacattagtacatttatttcagcatgtttgggtctttcaagtgattgagcaaagcatggtaacatctgtgagaaactgtcttttatgtccttatgcatatactacatgataactttgccctcccttgtccatcatgtgttttttaccattagtttgaatttgtttaactcttgtttagcttgtataatagagatgctgtacatgatatcttctgcttattttaagttctcttgggctgtacactgtgcaggctatgcatgcatttgatccccatgttctagagaatgtggatgggccaagttggagatgtctatctggagtccgtgctaatagacaaatcattcaattagttcccaatatgaaggtccaacaaccacctcactagatttattcatgtactgctatcttcattttttttgttttactcttgtcttttttgtatttgagttttgaaacctaatgttgtctcccattgtatcacttttgttcgttatgtacattttatatttctcagtttggtcctggttaatgtgttttgtcatgtcaaatcatatgtccttttttgttagcactgttgaagtctgctgcactttttatgacttcaaacctttcttgctactgctcttcctattctaattttctcttttttatggagtatgaatgcagaaatttcaatatttgttgcggtgcctcaaactatgggcaagaaaaagaggacttcattgccatgtaagtgatttctctacagttgaacataatgttgtcctttattttctataactatgctgttaatgattgcttaatggtatttcagctact

SEQ ID NO: 6027 - DNA, 1102 bp, Zea mays
  misc_feature (1086)..(1086): n is a, c, g, or t
  misc_feature (1098)..(1099): n is a, c, g, or t
aacatcctacgcttatattacattaaaagattatgttgataagattatgctgataagattatgttacatgaaaagattaacaagcaaagttcagactagatccacacaagttgataagatcatgttggattttcatgtcatggcaactatagtagtgctttgcttacctgatgaagaaaactccatgaaaaaaagaactcatgtcctacttcatgacagatttatactattgtttgcttgtttgatgtcaaaaaaccagggaaaagttcattcaaatatagcatccaattttcatcttatagtttccttagctatcttaatgatgacagacgaaatttactgatgaacatgtacaggtttatgagatcatacactagataataccttcccataatctatttctccatttctggtcctgcagaacagcagaccttgtggagggtgttctgcaaggtaggaatgggacagtgttctgctatggagctacaggggctggcaagacctacaccatgcttgggacaatggaaaaccccggggtaatggtgcttgcaataaatgatttgttctccaaggtgacgcagaagtaccactcaattaagctgtcatacctcgagatatacaatgagacggtgagggatttgctgtctcctggtagcccccttaacctgagagaagataagcaggtacatgaactgaaatgcttgaccatgtcttaactattgaaagcaagttttgttcagtgaatttacttactactgagattcttagctgtaagtattggatatggtaaaaggttaatcctgttgtaagtattggatattaccagtggattgagtagtaaaatgcatcagttctaaacacatggcctttttgtactttttctccacatgttttggactttggtaatcctccttaatagctaaccaaaaaagttttgggggcatttcagggaattgttgctgctggtcttacccaaagaagtgtatactccacggatgaggtataagttggttcttaggcatgattagcttgcaatggtttgaagcaaaaatgagaggaacattcttagctgattacatatgctgnttccaggtcatnnagt

SEQ ID NO: 6028 - DNA, 370 bp, Zea mays
catgaggtggtgaagcgagctcttactcttggaatggagagtccagctgctgaagctcttattgtcaagcttctgaaggaagcatctgaagaatgtttagtaagctctagtcagatgatgaaaggattccaccgtgttgctgagagtcttgatgatctcattcttgacataccatctgcaaagtctgaatttcagttgttggtatcaaaagccatttctgagggatggttagattcttcctatgtgaactcaggtgtcaacggaagcgttgaagacgatgaacatgagaagctggctaggtacaagagggaggctgtatccataatacacgaatactttctctctgatgatacaacagaggtcatccgta

SEQ ID NO: 6029 - DNA, 391 bp, Zea mays
cagaaagaagccatgccaaaggctgccttccagtttggggtgaagatgcaggacggcaggaagacgaggaagcagaacaaggaccagaagctcactaatgacctccacaagatcaacaagatcctggctaggaagaagggcgagaaagatggggcggaagatggcggtcactacgacgatgatttacctagctcgaagaaacagcgtggctgaagctgtcatttttcgtttctcctgctggttatggcattctacgggagagttacgatggtgtttagctggcagctgtatcatgatgctttcatttaaggtggcatcaggacataatacatgtcaaaaaactttacaaccgctggtcgatattttaacaggaacagaatgatccttggtg

SEQ ID NO: 6030 - DNA, 547 bp, Zea mays
gcatgggaagaagcacctgcaaggtgaaacttcgtgcctgcccctgctctttacgatcccatcgtgctaatgcagtcagctggaagatgtcgtctggccttctgattttcagcatatatattatccctgaatgtccttctgagtttcatgtttgtctgtgttcacaacacaacgatctggatgcaggagccatggtgaaggttacttgccaggcagatgaccaagcgctagtggcattcggctacaccagaagcaacggcaaatacagcgtggtcctcaagggactgccgattagcagcagcagcagcagcaactacggggctgctgactcgtgtaaggtcgagctacacggagcgccaggaggatcggactgcaacgtgccgatcgagctaaacctgtcagggctcagcgtctactcccgatcaagcgaggaggtggtcttcaaagcgaaccagataatggcgttcgcgtccaagaacgcgtttggctgttcatcgaaaccacagacgcagtcgtcatcatcaccggttcatccctactacaaaaa

SEQ ID NO: 6031 - DNA, 381 bp, Zea mays
cctgacgagagtatctgaatcagacaacatgtagcattgaattcagataaatatagtgtttggcttaatacacttggccctagatgttcatcaggagataacctcttgcagtttctggatgttacctagtctttgtatccctaatggcatagactaaagggcctgctcgtttctgtcggaattcactaggaatcgttccagctgatcgaacctagtataaattagacaaataattcggctagtaatctctagtaatcgttctgggtgtctattccctaggaaccgaacaggccctaaactgtaacctattgttcggttgcgttccatctggtgttgtttagatccaccatccatgaagtcaagcagcatcctatttgaggg

SEQ ID NO: 6032 - DNA, 231 bp, Zea mays
actccatcatgttctcgtccgccccctgcaagaagcccaaggtggaccccgccgccggcgccgacgacatggtcgccagcttcagcaccattgacccgcaggtcagcgcgcgccgcttgccgtgccgtgccgtgccgtgcctagctccggccttaatttgccgctccccggcgtcaaccatcatcgacggcgtggttccatgctgacgggagtgagctgttttttttttgg

SEQ ID NO: 6033 - DNA, 852 bp, Zea mays
aattgttgttgcatgtggcaggtatacttcttatgggtaattttgtgtgtacagttcttgttgtgtcatgcctagattctgaaagttgcaagacatcactttatagtcggacaatatttaacttcatgcagtggtggaaccatcgctggccttgctttaggatccagattgagcagcttaaatacaaaagtatgatctacccttgtctgttatattatctgacactgaactttccgagtaatatcctcttgctggataggttcatgcattctctgtttgtgatgaccctgaatacttctatgactatgtccaaggcctgattgatggacttaattctggtttcgattcacatgatatagttagcatggaaaatgtaagtgcagttcagaattttcattatttatagtaaatcattttggtgtgctaactccaaaaggttcatctgcagtggcttgtctcaacttgtttttacatatattaactacatttcataataaatttttttgatcagtacattagcatttggcattctcttcaacttctccttgacaggctaaggggttaggctatgccatgaacacagctgaggagcttaagtttgtcaaagacatagctgcatcaacaggcattgtccttgatccagtctacaggtgcaacctatgtctgaatcaatgaaatagatttggcacgcggatctatgttttggtctttgctagtcataaactgaataaaaatgcatgcttcattttaatgcagtgggaaggcggtttatggtttgctaaaagacatggctggcaatccagccaaatggaaaggtcgaaaagttctgtttatccacacaggtggtcttct

SEQ ID NO: 6034 - DNA, 528 bp, Zea mays
gacccactggaggggaactcaaagttggctcatcatctgctgatgaatatgaatgaaaagtaagtttgctcaactttcgatgcttatttgttttattatatttggaataaaacactatctaatcggtctgaatttgtttgcaggtaccctttattttttgaaagccgtttgggtgatggactacaaatgtcatttaaattctttgaatccatagtcagcaaccataagatggcagcaaacataaaatcaaatccaattgcatttgtcaaacctggcatatctagaatataccgtcttatccgttcaaatcgaaattccagaaacaaatttgtccactcgatagttcggaaattcgagtctgatagccggagtcgcagcacagttagctttcttgtgtaagtaattgaagtaaaaatacacttgttgacgctctattctttgatgaggtattgactgtcattttgtgtacacattgcagatactgtgccgaagttcttgcctccctgcctttcacatgctccgatgaac

SEQ ID NO: 6035 - DNA, 263 bp, Zea mays
ctgcctctgtctctcggttccgctgccgcttcgtggttcttgcctgctccctcccacaatttttttttttcatttcgattccttggcgggggccatctccctcccgtggtgcttggtgttgttggtggtgtgatgatttatttgtaggttgtggtgttggcttgctcgtgcctcctcctcctcaggccggccgggatggtccattcaattattttcttggcaaacaaaaacaaattgggttggtttggactggccgctgatcg

SEQ ID NO: 6036 - DNA, 377 bp, Zea mays
gctgctgagtcatccgactctagttccataccttactgtcgtatgtggtgtttccacgtatcctcacattttatggtatttgcagaatgccactctgattgatgtatatgccaacttggcatttgctgcgatcaagggcattagatggggctaggtcggtgtcaaatggctctacaacattgtcttctacttcctgctgtgcatcatcaatttcctcatcctgctatacgctgagtaggagggcatggaacctcgtccttatgtatatatttttttgtctggtagataactactgaagttatgcatgattccaccatataaagtattaaaatgatcatttctcctcctgatttttgttgtaacttaacccaactttc

SEQ ID NO: 6037 - DNA, 352 bp, Zea mays
gaagaaggtatgtctctgacctgagccccatcaagattgaggtaccttaaatgtaccaagttaccaatggatttcgggatggcctccactgctgtcttgctcaaatctaatacacgcaagcatgaagctgactccatgagaagatctattgctctgacatttgggcttttgaagagcatcagcgaccttaaacccatctgctgcttcagcgaaattggaccgtccaagctgttttccatgctacacaatgtgagatgccggggctttgacaatgaggtgttcagtttctgctggccataaattaagatactctcatctgctatcaaagcgcgggctagagagcggagaagat

SEQ ID NO: 6038 - DNA, 389 bp, Zea mays
cgggactccagctacggtttccatgttcccggcgagaaggagttctccaaggagcctcctcagctgccgtcccagctctacctcggcgtgctgaattcccggagcaccgaagaaggctgcgcgaggccgaggcacgtcgtcctcgaccatctctacatcgagaagggctggggcgcacagccgctggtggccctcggctacacccacaggttccgctccaagtacgtcacctgcgtcctgtacaaggccatcgagcggtagcctagctaaccattgctgtgctgttgtgggccggcaactatagctagccgtggtggacttggcagttcattcaattcaggtttagaagtctctcctgcataattcgttcatctgctaaactaaagagg

SEQ ID NO: 6039 - DNA, 382 bp, Zea mays
gcgcccagatgtggagaagcgcctcgacaacatgttcttgaactcgccagggcgaccaggctcctggagcgcggcaccttcactgccgaagcttccaaacccggtctgattgtgtcttcggggtcggcgttcaggcgctcacctgccggattccacaacgccgacgggccggatggccactgcgtcgaacacaatcaccgggagcgtgagtttggtcgcatcccgacccaacctcacggcccggtcaagggtaagatccccgatccacacttccaaaggtttggtgttatccctgattttactacctgattttactagaccgcacgaagggcatagggacccagaagattttaagggggctatggtagtcttcctcgtctga

SEQ ID NO: 6040 - DNA, 190 bp, Zea mays
  misc_feature (6)..(6): n is a, c, g, or t
  misc_feature (61)..(62): n is a, c, g, or t
agcgcnggtctcgctgcagctgcggtacgtcagggggaacagctgggacaggacccctggnngcaactccttctcctgcttcttccaggggatgatccgtagattgcgtagcgaaataagaatttgcgaggtagagatcctttcctttcagagcgcgcggtgacgcgatttagatgggtatcctcttttt

SEQ ID NO: 6041 - DNA, 606 bp, Zea mays
taaaatctaactctaataacaggccatccccgatttatcagcatctgcagtcagcaaagcacacggcatccaattagttcaacttgtgggcccaactgtgctctttcaggtaggcctgcactgcttccttgatggccagattcggaaccagctgatgctccttcagaggttctcgcgtcaccgggtcgaaattgccaacctgttacggaaacacagcggttaggttaggcttatggtaaccacatctgctagagcaaaattatgctgtcattttgtgtacatacaaaaagtaaacagcttcacaagtcagcggaagggcacaccttgtggagatgttcaacaagtacagccctctcatatgttacaccactcggtgtgatcactgggtctcggaagatctcgaatgttatctgacagcaaaggtaatcgggcacctaggttttacagcatggcagcagcagtttcagatcacagacatagaaaccaaagagttaacaaaaaaaaacaaagtttggtcagagtatttgctcatacatctgttggtgtatcggcgactgtcgcttggctgaagacctctgatagtagtttaatttgctctgaatactc

SEQ ID NO: 6042 - DNA, 1002 bp, Zea mays
  misc_feature (967)..(969): n is a, c, g, or t
  misc_feature (989)..(990): n is a, c, g, or t
gatataaaaggggcagatgcaagtaaagttattcttgttgttggaataatgactcttcattcttttggagaaggctctggtgtgggtgtttcctttgctggctcaaaagggttctctcagggtcttctagttactatagctatagcagtgcacaacattccagaaggcttagcagtaagcatggttctcgcatctagaggggtgtccccccaaaaggcaatgatgtggagtatcattacatctttaccacaggtgcagttcttaacttcattttctgagttgaaatatgaaataatttcatcattttattgtctttattcttgaaacattacgaaaagcgtaccaacttttgagttaacttgatctatttgcaactatgaagggacaaaaaatcaacctttgttttgtggacttttaaagtaactgtgttttcctctttctcccggtgtctgtgactctatttattcatgttcatgtgcttgtttgtgcaaacgagtgattcagtgtagagtgtggatagacaggataacttgtaaagtggtgtaagattaaggctgtaactttgctgtgtattgatgaacgttgtcctgtgaggcttttattaatttatctatatattcaaattaccaaactgaatcatagtggtagttaatttagtagcactaactgtaatatgatttgcaaggtgcagtgggtgttttcttcagccttcacagccaccttctaagcagtttcctattcttcctggttcctgctagttttgtataagcattatcatgtactaaatctgtgatcctatctgcagttcagtagagttatttcttaggttgtgaatacataattcatctccccatatgcaacggcagtctaattcagtttcagtagcgacattatttacttcgtttttgtttgcaaacccagccaattgttgctgttcctgcattcctctgtgccgatgcattccagnnnggtgcttccctttgtactgnncgcagcaggggc

SEQ ID NO: 6043 - DNA, 635 bp, Zea mays
accatatcaacccctttcccctttagctccttcccaccgatacgcccgccgcgtgaagcattcgttagccgagccgccgcaaccatgtcgtcgttctggggtaagaatcgtttccggggctaccgatgttgctgccaatttccattgtgcttgattctgttggtccgaccggactattgcgtgattcgcaggtgtggaagtgaagcccgggaagccctacactctcacccatggcgacttcgccggccgcctgcgcctcacccaggtccgcttctcctcaatgtctcctcttacaatttgatggccaacgggtttatcacgtcgtatttaggaggcttacagttgtatcttatatctagtgctgtggttgtgggaaatgtgattttctttggattggcaaatggcaacgcaggcgacgctaggggttgatgtcggcaagggggagaaggctaccggcgtgaagaggtgtgtgctacagtgcagtgccgagaacagagatcccgtttttctttgcgtcctcatgccggagcagtcggagacatgccacctggagctagaatttgaggaggaagtcactttctcagtgattgggccaaggagcatccacctcgctggatactatatgaactgatgcg

SEQ ID NO: 6044 - DNA, 1019 bp, Zea mays
  misc_feature (965)..(965): n is a, c, g, or t
aatattgcttttaacaaggtattgctgtttctcacctgcatggtcacaaatttacttagtcaattttgttttaatgggttaaagtatggagaaaatacgttgtacttggcaaaataagctcgaaagtcagaaatacagatatggaattgagtgaaatgtttactattatctggaattctgtagcagttcatactttttctgcaatgactttgtctgcatttgttatctagatccgtgacttaaatgagttgtccagaaaggaggttgatgagataataaaagtgtgcatgaagcaagattgcatatctcctaacgataacatccgtaaaaggtaagctcttaattttctcgaaatctttggttctgacgctgactgattttgtctagctaatccttcaacaatatgttctgtaacagttttttttatttgtttgcaggaggtacattgcaatgatagatttgtgttgcatggctggcaaccgagaccaactcattacccttctactccaaataacggaatgtgccgttactattctcctcattcattttcaggacgagtaagaatgtttatcagtttaactaaaggttctatagcttactattcagttcttacattagaaagtcaataattttctctgtatttgtagtgcttctgcaaaaggtctttcttcattttctgatgaactccttcctgtgctggagagactagagcatttgaaagaggtaaaacacatatatgtactatatactagggctttaggtggctgccatgacccatggggttcactctgctttcatactcttggcacctataaattagacgtttaatgctgggatatgctgctgcattgtttgacaagaaatctatgtatattcttttggttgtacaatagctaaacataaatttaaaagagcagatgctttcacatagattatgtttattaattcgatctggagtattaaancctttttattggacctgcaggacaaagtggacgtagtctgaagtgtccacagtc

SEQ ID NO: 6045 - DNA, 375 bp, Zea mays
tcggcgatgcatcacaagaacagaggaggctgccatgtcgttattaggacctccggcacggggagccatctgcttgctagttgtgtcgtcgtcgatcgtggtcctcagcacggccggtggtctcggatccgatgccactagtaggtccgccgctgcctatctctcacttgacgacgactacggggaggagaacgagagcggcgactcctccttctccttccccgaccccgagacgagttcagcttcaaccgggctagtgttcgggttctacgacgacaagtgcccggacgccgaggagatggtgtcgtccatggtgcggaagctctaccacgcggaccccaacgtcgcagccgcactcgtccgcctcttcttcca

SEQ ID NO: 6046 - DNA, 170 bp, Zea mays
ctttatgtaaatatgtgtatgctaattaataacttcttttattatacagaggttgaattttaatgtggatgttataaatctgagtatgccggatcgtgcaagaccaaaaggacggacaataaaaaatacagaagataggattatgaaactaggggccaaaggaaaaaaaa

SEQ ID NO: 6047 - DNA, 804 bp, Zea mays
gattaaccaaagaataccgcacgccactacttgtaatttccttaacttcgtcaccttactccatgccaagatcaacaactatagtttgtaaattgtaattgtgattatttattaaattggcagctagggattggcctacttgtactgcaaaatcttagtggaatcaacggtgtactgttttatgcaagtagcatcttcaaagctgcaggtaagttgcagtctttatcttgtctgtacttcttttatccgtagtagttggtttgataagttttagcatgatagtttggatacactgtaaatttaattggaaatgatattttgactactgaagcaacctcttacattatttgtttggcagtgtcctttcaagatgtaggaatagaatcatagactgctgattttgaaaccacttgaatgcagttgtttctaaaaaaacccactaggatgcacaaacttaaatttcctcctagatcataataggatcaataaagattataaaatggattaccttttaagttgtaacatagtttatcattcctttcatctctgaaagatggcatttcattgtattttgtaaatttaggtcatttaatgctcagaaatagtccaagtcagataggccctatgtattgttcaaacaaatacataggcgctatgtattaatagtttgagctcatttatcattctttacaacaacgataatatagtaaacttttgtcctatccaaaatctccaggggttacaaacagcgacttggccacctgttcacttggtgctattcaggtgtgtagctaggatgagtat

SEQ ID NO: 6048 - DNA, 398 bp, Zea mays
  misc_feature (392)..(392): n is a, c, g, or t
agagctcaagtgagggtggctccccatcacgcgagagctttggctcggacggggaggagtctagaattgactcggagcttcgacatcttgttgctggggagatggaggccatgaaggtgattgaggaggaagaggagaatgggagtgttgccaacgttgtaccccctgctcctgctgagaatgggaccccagtaaaggaacactcttccagttcgtccaagaagtcgaagaaggcctcaaaatcacagcttgagtctgatgcctctgttggactcaatggaaaggcgtccactgaggaaggtgagagcgaggtcagcaaaccggcaagccgagttggccgacggcggaaatcaaatgccaacccacagagtggaacagaagatgctggtttntgataa

SEQ ID NO: 6049 - DNA, 367 bp, Zea mays
aaaatctcgaagcaatggcaatgtatattccagtgtagaagcaacagtactgtgtaattacaagggagggagcaacatctacagccctgggacacccacattgccaaaaaactaaaatttgctggttttgcttaatgctagctactcctaatggcaaaactggctgtacttaccacccagcctcaggtgtttattgagctgatcaaatccacatcaatttgcatgtacacccgcctgcttgccatctaacttgccagtaatcatgctgcattgcttgcttcttttctcccctggaattgttatggtaaccaccagtctcgccatctgctcaaccaccctgatctcttcggataagatgacagggcta

SEQ ID NO: 6050 - DNA, 374 bp, Zea mays
tagttgacacagaatgagttcgacatggatgtaatacagtgcatccattgatgagacctcctgaacttcaggatattgagagttggtagcggtatattttcactactcaaactgaatcaccaatgtggattaacttgacactggcttcctagtgatccggtttgttgtctgcatcacttcttataagtatgctgccttattcgagagtcagttcaagttttctagttccatattgccttcctcaagacaagctaggaaacaacctattcaattcatacagtcgcatcctccaggcttgcttcatacatgcattaagcttaggaagaaggaaatgaagcaacctcaagaggacaaaggagctagccaatgcaaga

SEQ ID NO: 6051 - DNA, 847 bp, Zea mays
gcttatctttccacgcacaaatttcataattgtttttcgcattgcagaagaactcactttccacagttacaaagatttctagaacatttagtaagttctattcgtacaggatataatggaatatgtattcagattgttttctctaggaaaaataaaattgaaacaaatgtgtatgataaaaaaactttattaaagattgattcgtcgttagcaaactcttataaagtggcattagtatgtggaggaaggtgatcatggaattttttgcatgtattcagtggactaatgcacttaaattgatctttagtatcagcatccaacaaagtagaatgtaattctacaatatgcgagataagatatcttccattccataaactctagttatgaccagcacaatgcaatattgtttttctttccttacatttattgtaggcttagtgaataagatgctatgaattctgaattgttgtaaagctattttccagaatgacagggcctctatagttggagatgccattgaatacatcaatgagcttaatagaacagtgaaagaactgaagatcctacttgaaaagaagaggaacagcgctgacaggaggaagatactgaagttggatgaggaggcagctgatgatggggaaagttcttcaatgcagccagtgagtgatgatcaaaacaatcagatgaatgggactataaggagctcctgggttcaaaggaggtccaaggagtgtgacgttgatgtccgcatagtcgatgatgaaataaatatcaaattcacagagaagaagagagccaactctttgctttgtgctgcaaaggttctagaggagtttcatcttgagct

SEQ ID NO: 6052 - DNA, 262 bp, Zea mays
  misc_feature (204)..(204): n is a, c, g, or t
acgctgtgaacatcatgcaggaggcgcacgtgaatgggctgtcagtggtgattgtctgttcccagtccgaggctgaggagcactgcacgtcgctcaggggcaacggcctccggagctcgatcgagcccgcgagtggtggctgctgaggttcgagacttgggggtataccttgttttgccagcgtatagtttgtaaatacccagngtatcaagctaaagctgaaacggattggttatatgcacttatcgatacacgaagctga

SEQ ID NO: 6053 - DNA, 374 bp, Zea mays
cgggctggaggttcatgtgaagtggctccagagtaacttcaccttcatggaagagaaaacttgatgccaggtgcaggtacttgttcctgtgcacgcatattcagcacccaagtatatcgggcgcctgaagaaaaccttgctctgtacatggaaaccgaaaaaaaaggtaaatatttgcttgcctcagtgctcccttccgagttccgaagcttgtacgctattgctgcacaattccggcattcattggctcaagtgaatagcgatgtaaatgtattttaagggaagccaactttgtaccagtgacgatctgattccgaaattatcgaacagattgccaagttcagtaactctgcatgtcagatttgctgaaactg

SEQ ID NO: 6054 - DNA, 372 bp, Zea mays
ttgtgtgggtgacacaaacacagacacattcatcacagcaatgcatgcatgcaactgatgcagatgagacgtcgtcgacgactgcgtttgttttatttttacagtaccaagcaagcattctctctcgttttggttttggttggatgagacgtcgacgagtggctcagttcaggagttgttgttgtcagcggcgtgcactgcgtaggacggctccggctccggctccgcagcgacggcgggtggtggcacaacgccaacggtatccactttgccgtcgttcttggggatgatgaggccgtatccgccttccttcctgcggtagaggatgttcacctgccccgtggcctcgtccctgaagcagtagaagtcgtg

SEQ ID NO: 6055 - DNA, 385 bp, Zea mays
ctatcacagaaccgatatagagattgatgtgtttgccgtgcgctccggcagcagcgattccgacaggccccacggcggtcgcaacccagccagcggcgagaaccctgggacaaggacaattactagcgtcggcgctacagcaagcggatcaggccaagaggacctgcttgtggccaccaatattacagaggcgtgtaagagtgaatccagtctcgctgctccgccatcgaagccgtctgtatctttttgttttgttttggtcggagtttatttgctctagagagaccagtcacctggtatggaacatctactaatttcagagaattttgcatgttcgtctcggtgtgtcgttacacaatttgcggatgttgaaacgacactgaat

SEQ ID NO: 6056 - DNA, 479 bp, Zea mays
tacttagcaaccaaacaacaccttagataccgagaacaatacctagcattatgaaatttgccacatttagtttaacagcagtagcatcatgtgtttactgatgggcatcacccagtgcttatttacaaatttggccagatgcaaaggatttagcacgttgtaaccgagcattcatttaccaatgctaattctcaacagggagaacatcagtgaccggcatcctattcaggcataggcagtgatggcagggagtttctgtggatgcacaatcaaacgagtaagttcatgtgtcgttgcagttacatttttatgacatcataacgtgggcaagaagagtaaatttaccttgagcgcatgtcattgttaattatccttggcatgggaaaggtctttctggtcaggcctgttctcttctagctttccatttgttgcttcttctagtgccttattctgtttcaacacctcttccaatttcttcc

SEQ ID NO: 6057 - DNA, 488 bp, Zea mays
acatacatctataatcttctttcgtgttttctttgactctttctgataagctcatagatctaataagttattggtaactctgaatgttttctcctcagctgaatgtccgaaactactgggaagcaattggagtcatcgctgctcacaaggcaggtgtcaatccacatgctcttagaagacgagggattgatcatcttaagagccctcaacgatcatattctgcctactctgcaagtcctaaaccatctgcccgtcctccagtgcacgataaagtacagagacagcagctagttaggcaaatttagtactaaaaagagcactagcagcagtagaaattactttagatagtcgtgattaggaacttccaaaattttgaagcccagatacatatttttcagaccgtcctgaagtgtaggaccatagcatcacacgaattttgtcgtgttatccagtctggacttcgctgacatgagtctttctccactgcc

SEQ ID NO: 6058 - DNA, 373 bp, Zea mays
cccggattgatgaagctcctgcatgcattgcatgcggagtcttcaaggggatttcagctggcactcatgcattcaagtaaaggctccaattcgagataccggtgcgtttcaataagcaggttcaacagtatctttcgttaaaaaaaacagctctgcttttcgggcggctgctatgtcgcactgcacagtgtggcgtagcgcagcgatggcaagctaatgcctaagaaaaaaaaacatacgtgcatatagaaaccactgatattagtgtagacgctgacaacctacggagaaatttgtaatggcagttcagggatgtaaatctttttacgaggcaacaggtcacagttcttattgtctggtagtgatagcagtg

SEQ ID NO: 6059 - DNA, 747 bp, Zea mays
agacattgaggtaacagtgaaaactcaattattctccttccgccccactgcattaccagcaagagtccactagtgtcatttccctgagtctagtattatttcacccatacttcattgttcccttcgttttatttagttttttttccatctttcaacaatttcttgagtaccacagttgttttctctctctttaatgaatgttaagttataactgaattttaacatggagtttccgttttcaaatccattgtacagatagaagctccaaaaaagaagagcaaacctgggaaatctgtctatgcaaaagccacagatactggcatcgatcctgagacagctgctaaaagacttaaccttgactgggactctgctgctgatatagatggcgaagaggaggacgatgatgaaactgaagtgccgtctgcagtggtaagtttgtctttgaaagtactccagcaaattttatactcatggctattgtgggtaaagcaagcaaaaagaacaactttcaactaaatgctcataccttaatgttcttataccacttattttaacgtgtttttttttgttttgttctgcagggatatggtgccttgtatttgttgacagcttttccggttattattgggatctcagtcgtcctaattcttttctacaattctctgcagtagctcctccccttcttgagtgagaatgtgagatgttgctgcattcttgtaaatctgagttacaaggctagttaatcag

SEQ ID NO: 6060 - DNA, 333 bp, Zea mays
atgataccgaacggcccatcgtaggcatcccttgaacctagtcttaggagaaggatgacggtcctctcaaaggttccgttgccatcaagctcttcagtggcgaccaacacacatccagactctggcatagggatggaatgagcccacttccgaggaagacgatatgctgctccatcctgacctgtctgcactagactatttgcatctaatgtttgctcctagtttggatgcatgacaaataacaaattagcaaaaaaaaagtaatgagggacttcttaacaaaaataccaattagcttcaggcagagacgaggctactgctttgctaaggcct

SEQ ID NO: 6061 - DNA, 295 bp, Zea mays
ttttttctcgaaaaaacgcaggaggactatgaaagggtttggagatcttgggctccaccaaaatgttgttttttcatttggttggtggcccaaaatagatgttggacagctgatcgcttggcaaaaaggggattgaatcaccctatcagatgtcctttatgtgaccagcaaggggaaaccctgaaccacttgcttgtgaattgtgtcttctcaaggattttctggtacaacctgctaataaagttcgggctgcatagtttagccccacagccagatgcagtctcttttatggatt

SEQ ID NO: 6062 - DNA, 356 bp, Zea mays
tgctgcccttcttcaacgccgtgctcggcctcatcggcgcgctcggcttctggccgctctccgtctacttccccgtcagcatgcacatggccaggctcaacatccgacgcggagagatccgctggtggatgctgcaggccatgagcttcgtctgcctcctcatctccgtcgcagccagcatcggatccgtgcacgacatcgtgcacaacctcaaggccgccgcgccattcaacactgcaaactgattaataaacatgcatttactagtatatatacggatcggatcggaggagtgatgggttaattagtttcttaattagctttggctactatatctatcagtatcagagtcagag

SEQ ID NO: 6063 - DNA, 367 bp, Zea mays
  misc_feature (358)..(359): n is a, c, g, or t
caggggcctcgccgactgggacgaggcggagaaggagcacctcggcgaggagctctccgacgtgctgctctacctggtccgcctctccgacatgtgcggcgtcgacctcggcgacgccgccctcaggaagatcgtcaagaacgccgtcaagtacccggcgccgtccaaggaacaaggcgcctgatgatgacgaacaataccacctgtgatgccttctttgatgctttgggatagctggtgcctggtagagaaccaggcagcgagatatatgaactgatgcttggaccctttttccccctttttttgcggtgcatgctcgaaggttaataattgatacaattattgctcggctgatatnntagcttta

SEQ ID NO: 6064 - DNA, 740 bp, Zea mays
  misc_feature (16)..(18): n is a, c, g, or t
gtaaattcccatcatnnngagtcatcgtcatcatccatagaatccataccctcttcatcagaatcctattggaaatttaaaattagacacaacaaaacaaaattaaactggtgagatcaagtttatttaacagtgtaaacagaacatgcaaaaagtgtatctgcgttctgcagaagcaaaaggaacagctactgatacttactcctttacttctggagctctccaactccgactgccatttttcgagaaaatttgcaaattcagggtcctacaaacaagacaaatatttaaagtctatattgaaatcactataagcaatgtacatcacaaccctagaatttcacttgaaattgtactggcatttcatatatgtttcttatttgacagtcgcagataattcgaagcaccttgaatagatcgtgacatcaaaaactcatggattagtgcagaatctctacataactacaaccacaaactgtgtctaaaaatacacacactgggtgcacttcaattactactttattaaatgaaaaggtccagaagttcagagctgagctgacctaacctaaaaatgagcttagtagcttacccaattggttgagcagaaagtatacagttacatactatgatacaattaacactatcagctatagcctacagaaatttcgccaacatttttctgtgcacaaattttcttccagaccccattaacattatatgatgagctctgtatgctgaaa

SEQ ID NO: 6065 - DNA, 361 bp, Zea mays
cactgcatgatcccaatcccattcggatttcctcacgacgaattaatgaagaagggcgtgtgagtgtgagggagaaagttatacttgtatgtatttttttttcagttttattttgtcgtttcgttttcctttctttttcccagtaggttgccgtacgtgagtagacaatgctggcttttggaattcagagatgtagtatgtggtgtaaaatgaattccaaaagctagcagtgcctaccctatttgttgtctagttcttttatcttccttggcgttctagacgcccgtccggggaggtagaacggacagacgaacccaacagtgtgcaagatcacatgactagagaatcatcgaccaatgca

SEQ ID NO: 6066 - DNA, 388 bp, Zea mays
ccgtagttgacccacttcttgcccgttgcattcgtggcgtgcagtgctggtctctcttcgccggtgacacttttgtcctgttgccggcggtggttgggttattgcagtggccacggcggagcacgaggttttgtctttttcagcatgtgctacgagggttgggccgttggggattgtaagcgtgtacggcagaaaggagagatccataatggacatgcgtgggcctggactttacatgtactcctacttagggagcataagtgggccacgagcccatggacaaggactcgtgattctgtcttaacgttacgtatacctgcttcgatgcgtaccggaaatgattcaaacttgcgctcccttccctccaacttcaacgcatatgataaaa

SEQ ID NO: 6067 - DNA, 390 bp, Zea mays
gcctccgccgactagggagctatcagtggcagactttcgatgtggtgcattatttttcgcttagctttaatccgtaccggcttctactgcttatacaatgttttgtctttatgaattgcagctgcagcagtccaaacaactgactttaagattgaagcgaacatagtctggaactatttgtttcaaatacctcgcagagaaactcaaaccacacacgcatataaactgtttcaaataccttcttgatcaaaaggtccaatctactcatcaggtagggtttcaggtcagccacatcttgagaccatagtcatataggctggaactagctgcacttttcaccttttcgcaaaggcaccacttacatgaacatggccattattaaagcctaaa

SEQ ID NO: 6068 - DNA, 456 bp, Zea mays
tcatctgcagtagaggaggatcaagacgacgatgaggaagaagagtgggttgaagttgacccaagtgagatggagttggctgatgagtctacttcaaacatgcaagaagatgagcactcctcaaaatcagatgatgacatggatgaccttgaagagttggatatctcgtcgtgtttcatgtgtgacctcaagcatgacaccatagaagactgcatggtccatatgcataagaagcatgggtttttcatacctgacagtgaatacttgaaggatcccagtggtcttcttacttatgttggactgaaggtatacatttttcaccagtgtaatatcgaatgccatatgtgtgcaagcatgctgtttaatcttcacgttgaattggttatcctacctgcaggtgaagcgtgattttatctgcctctactgcaatgacagatgccagtccttcttcagtct

SEQ ID NO: 6069 - DNA, 372 bp, Zea mays
ctcgggcgcccgcccggccatgggatgggatggggaggcgttgcagcagcaatttatgtgctacctacgtactagtatttattataattgttattactaacaacaacgactggtagtatcgatcagagaccgacgctattcgatcgttggttcgtttcattgtcctttccttccttgctagctggtggtgtatcgaccatctaaatctaacaggacacgtggacctggacggcaagagatgtccagtccagcagtgtggaacgtttgttgctttgtctatcattaattgctataagtttgtttcatatatacatatatactactgtaattgcagtatattgaataatgccaaatcaagcgggacaagacgtg

SEQ ID NO: 6070 - DNA, 861 bp, Zea mays
  misc_feature (25)..(25): n is a, c, g, or t
tactgctggagctggtctccctgtncacatgaaaggtgaactaaacacagctttcataggactgggggatgacggtggatatggtggtggctgggttcctttggcagctcttaaaaaggtgctgagagggatcctaaagtacctcggagttctatggttgtttgcacaattgcctgaacttttgaaagaaatactaggatcaatcttaaaggacaatgaaggtgctctcttgaatttggatcaagagcagcctgcactccggttctatgtcgggtaagaaaatataaactggcaagtatcccttgttttctagcatcatatttaaagtaaatgctattcatttttttttggctgcgcaattaagattgaggatctacatgaaagtatccttaattttctattgtgcatggaagctttggtgcttagcgatattgagttccctgaccttcttatggaaatagtactttgtttatatctgctgctcttcggattatatattcattcatctattacatgttactagtgtgcgtcaaatatttactgattccttaatactatacttaattgtttactgaatataagtggtgttcttttatttaatttgatgctatcagctcataattggttgagcttaggctagccttataagatgaaaaattggtgttcaaaatgactcgtcttgtttttcctgagttgagtattttcatttgggattgctagtaaattggtacctgatttcataattgcagaggatatgtatttgcagtaagtgtacatcgggttcaactgcttctacaagttttgagtgtgaaaagatttcaccaccagcaacagcagcagcaggctcaaagcaatgctcag

SEQ ID NO: 6071 - DNA, 730 bp, Zea mays
ttcgtcacttatgcatatttttaattttaagttttgtgtaagtcattaaattcttcccctatatttctaagattcattctaattacttgcatggtggtcatacaagaattccacatgtaaccggttaaggcctgttcggttttcacggattggagctccggaatgattcgtagcctaatttatataaattttgatgagctagaaccaatcccgtttcattcctcgaacgggccctaagggcttgttcggttagacgggattaaatcctctcctccaatctccctcattccacctctaatcgaacaagttctaactgtttttggaacactgatttgtaccactgcaggaatatcccctctctctctctgttagatgagcttttaaacagattttactgaatttccccctttcccgtctataaatattttaacgttcctttgtaatgtatacattgcggatggaatatagcccttcctgttttctgatcaactgaattttctgtttcgttcctcaggattgaggtttagcaatctgtactgtgaccctctaatcatccccggcggtcacaagatcacggcaaggcagcggtggcaaccaacaccgatgcagctgcagatcctggagagcatcttcgaccagggcaacgggacaccgagcaagcagaagataaaggagataacagcggagctctcgcagcacggccagatctcggagacgaacgtgtacaact

SEQ ID NO: 6072 - DNA, 401 bp, Zea mays
cgagttgccaaagctttcgaacttgtatttgcagggtaaccagtttagcggttttattccgttctccatcagttcatcaaaggatctaatcgagctcaacctgggtgataatgctctgactggtaacatcccaaccatgccaaccactgtgaccacatctcttctgaatcttagtcataaccttcttgacgggtctattccttcaaacatcaactctttaggtgaactagagattcttgatctttctcacaatgccctgtctggtgctgtgccatcttcactatggagcctgcaaagcctgacactgctggacctttcctataataatctgtctgggtctattcctagattcggtccaagtcaaactgtagatattgtcggaaatcctggtcttgtaattg

SEQ ID NO: 6073 - DNA, 392 bp, Zea mays
gggggagttctggtgccgagttgctagatgaaaatatttcttcagaaggggaaagttcggacgatgagtctgatggttttgactccgatgatgagatggacttgacacctgcccctcctggaacagaagaaaatatggagggttcatctgttgcaaacaaacatgatgccgatggagataccaaagaggaagatgacgcatctgatgatgaagatggtacggatcaagatgactccaacagtgatagtgatgaactagacgatgactctgatgtggatgtgggtactgatatatctgatgaagacgaaggtgacgacggtgaactgaaagaaagcataaatggttcagaggatgaagctttagaccagaatgaagacagcgaagaggaagaa

SEQ ID NO: 6074 - DNA, 809 bp, Zea mays
agattagtgttgttcctggtgcaagcagaagagggcagagagaagttgttatgatgtatggctcttctttggcattgcctttgctattggattcacaagtcatgtagcaactttctttcttgtgttcatgacgtgtttcttttcaggcctggtggaagtgggtttggacaaggtgcatctggcccatctagttcgcttcctgggtaggttctcatggctagatattttataggctaatcacatgcaaaaagctttcctcctataacatgtaaaagtgttgcaggaatagccatttcaagctagtcaatttataattgccaaaacttgtgatcccccctatttttaaaaccgcatatggttgcgggctgtggacttgtgcgctgtgtcgtatttaagtgtggcattacctaccaacatggcgcattagactcagtagtaactaactacaccaatgtaacatgaactaaaaagttttatgtttgttacgccttcaatttttttggcaacaaaaacacctgcaattactagacatcattttcatggttattgtgctatgtccaggtggaagcgtggaggctttgttcgaagaggacaagggcgtgttagttttcctcaaagagggcgagggcaagtgcgcagccgtggccgtggccgtggccgcagtagctttgttcagagccgtggacgtggctatgtgcgcaggggtaatgcagagaaatcagccaaacaattggacaaggaacttgacaactacaactctggtgcgatgaatgtcgactaagttaatccatcgtgacatcattcaatcc

SEQ ID NO: 6075 - DNA, 533 bp, Zea mays
tggctgttacatctgctgttctgtgtatatattcaatttttgggaggaaacaagcccagccttttctgactgagtgctgtgtttgtaacggtgataatgcaggtcattttggtcggccatagttgcggaggtgcgagtgtctcgtatgcactggagcagtacccccgaaagatctcaaaggcggtgtttcttactgctacaatggtaaaggatggccagaggccctttgacgtgttctcggaggaagtacggaatcactctctataatctacgtttacattttccatttgctgttttcttgcaaaggggctcacgttgacctacattcgacagctccggtcggcggatgttttcttgcaagagtcacagtttctagtctatggaaatgggaaggacaagcctcctactgggctgatgttcgataagcagcagatcaaggggctgtatttcaaccaaaccccttccaaggtacattgtgttctaccattatgcaaccagaaccagttgatagacgtactgtactgtgtccaccc

SEQ ID NO: 6076 - DNA, 485 bp, Zea mays
gcttctttggggggaagcaagacgagggccttgctaaagctgtagaaactgttctgaagaaagcaactgactgtgagttggcatccattgatgctatggctgcagcagcccattccttggtgatccctcttgcaatatttagagaaaggttgggtattgaggaggccattgagttgatcaggcttgaagaagaccaccaggtgtttatcccgcgaccatcatgttcatccattgtttagaatcatttgccctttatttcgccttaaggtttctgaatttacccaggttgatcgatggggcttggtggaaggaggtcatgacgttgatatcgcggatcttaaagtgcagatgtcctcggctgttgtatttcttggactttcacggggactgtgaaccatcctgtttcttacctatatgttggttagttgtttatttccaagcttgtatgaatctgagaccaagagttgtagagaataattgccgcg

SEQ ID NO: 6077 - DNA, 350 bp, Zea mays
aaacaaacttggagatcagattattggtcgcactgtaaaggttggtctcattatagacacctctgttgcgaatgcagtcataacaatgtattccaagtgcggaaggattttagaagctcgaaaggtatttgacttcctgaacgtgaaggatattgtatcttggaatgccatgatcactggttattcacagcacggaatgggaaaacaagccatagagatctttgatgacatacttaaaagaggtgcaaagccagactacataagctatgttgcagttctgtcaggctgcagccactctggactcgtgcaggaggggaaattttattttgatatgatgaagagggcccata

SEQ ID NO: 6078 - DNA, 520 bp, Zea mays
ctgagctatatctacgaagggaacacgtacctcagccgtctgagctcagcaccaaatgccttgcagcatggagagaggggtttgcagaacatcgttcggtttttcgggtgcccgtatccagtctccagagctgtgttgcgactgcggtactccaacgctgccaagttgcaggatgattcagggtcgaaacttctttagagaggtatggatcaatagatcagtcaaaatcctctgttttttttatttatgttccttcttataaatcagtcatggtgtaacagacagtttcgtttacattacatgtcggtttcagtgctatactctcgattaagacgccgtttcgagtcgctgagacagttctgttctgttactcggaaattgtgatttgtgaacctcactcagttgaccaccggcagatttgtctgaataactgaagccgttttaggatgcagcactcatgacaacccgtgttcgatctggaggaaggattagttggcaacacagctatcccagttttcac

SEQ ID NO: 6079 - DNA, 364 bp, Zea mays
aagtttcttacatggtttagcttacgtgccaccctgcaagagagaaagatagttagcgtatatgtggatactcttatcgaggaccctgtcagtctctctggccagctcgtcgacagcttctcggagaggatatatagcaaaaagcggccttccatgccttctggtttctgcatggatctgtggcattaaggaactgcagggtcttaccgttcgctttgtagggagcatattcggcccattcttttgttgcagatcgttgcattgattcttcattggaaatttagctgaagtatttgacttgcacatcttcattgaaactttccttggtgatgacagtaggttatgttatcgtcgggcaacttct

SEQ ID NO: 6080 - DNA, 1008 bp, Zea mays
  misc_feature (742)..(742): n is a, c, g, or t
  misc_feature (744)..(744): n is a, c, g, or t
gtcgttgtctcgttctctccttccatgacctgaaacaaagctggctcttgctaagattttctcttcagcaacgcatagagacgcattcaggatgccgaatgcacttgggattgcgtatttgtctaaccatgtgaagttagcaggcagaagtcatgcgcttacctcttgagatacgccttgtgcaccgtacttgtcgtcccagaacatcgttgctatgcggtatatttgagttatgctcaaaacctgtgaaaacacacagcatttcatacatacttgctagcttgaagaaaacctaagcacttataagatgctttcgttgcagcttacagggcaaatctcatccgtaatttcctccaggattttgtgtgatttctgatgcaaaacctgtgatttggattcatctaataagtagacagatcaaactagtatagcagttaaaataactgcatgtttttcatgcataccaggaacccgactgcctgcctaatgtgttgcagttcatcccaggatgtccctacatactgcatcatggagaatgtttcagcttaattagcactctcttactgattatagtttttgtcttgttaaaaaattactaaggcttcggtttgattgaggggattggtggggattaaatccctttctattcaaaattgaatagcgatagagaattaatcccctttaatcctgctcaatccacccgtaatcgaacatgtactaagagagagaaaagagttattcncntcttcagttgtcctagagcaccactgctccaggtcttgtaaaccagcctttaagaactccccattgctaaaagagcagcattcccgacgaagcagcaagctaaacaaaaaaaggtagaaatttgatacagtacggaatcaaccatgtaaagcatgtgccaaggatatttttggtatcccatatgaactgtgcagtcaagtttttctaagaattggaatgagatatagcagcacctgttgaagagttgcacattcaagtagcaaa

SEQ ID NO: 6081 - DNA, 446 bp, Zea mays
tctgcttctcttgtattcagctcatgatcgatcgagatgtctgtttctgttaggtatttgtatgctgacctgtacgcctcggccatgtggaccggcgcggaggctccagagagcagtggcaactacacctccgctctgatccccttcagctgctccaaggagtctccgataccatgcgacgccgctgctgggagccctctcccgtcgcttggctacgtatactcgttcggcgaggacaacagcaaggacacgtatgtgttggccagcaaaggcgtctaccgagttgtgaggcccagcctctgcagctatacttgcccggcagagacacaagagacatcgccgcctgctgctccttcatccaacaaggcttccatggcggagatgcgaatgggaatgcttttggtgtctgtcattgtggtttgggttttggtaacataggatcatgc

SEQ ID NO: 6082 - DNA, 531 bp, Zea mays
gcttttcgctgctagctaccgcccgcccggtgtctgtcgatctgtgacgaccgccaagccgaagccaaaaaggcagcagtagtcgtcaagttcatcgatctcggcatcgacgaccgcccggccgtccatggcgcggggcaaggtgcagctgcggcgcatcgagaacccggtgcaccggcaggtgaccttctgcaagcgccgcgccgggctgctcaaaaaggcccgggagctctccgtcctctgcgacgcccacgtcggcatcatcgtcttctccgcgcacggcaagctctacgacctcgccaccaccgggtacgtacgtacaacgtcgccccacgcccacgcacgcatctatccaactatccaagcagcgcaggctctgctagctgtgctggagactgctggtcgatgacgagaggtgatcatccgacgactgctgcaggaccatggaagagctgatcgagaggtacaggactgccagcagcggagaagcagccgacggctgcggcgacaataacagaatggacccaaagc

SEQ ID NO: 6083 - DNA, 845 bp, Zea mays
  misc_feature (839)..(841): n is a, c, g, or t
gctaggctcctgtggctgaataatgtctcatatccaggtccaacctttaaacttcctggactatggtgctttgcttgaacatgtttgactatgagttgccttacttcttgtggagaagacgcatttgaatttatttacctaaacaaaatcttacctgtgcatcttttgatagctgtttaggccctgctgaaatgtgattttctttaattattggaaaaatactaagtttgcaaaaaaaaaagtttgtcaaacttctaggtgtttggatgtaacaaacctttttaaaaccatagtctaagttttagaaactccaatttataatttttttttcaaaccacggttttgcgtgtctttggcttataaaaccccaatttcttgataccatagctttctaaaagccaaaacatccaaacagccctttagttccatatttgtttcttttttccttctgtgcgttaattattcctatatgttcaggagctatgtacaacaatggataatcatgacatagtttttccgaacatacaagatacacctcataccatacatgattgtgtcttgcggctcattaaatttctgaagcaatcataatgttcacgtactcttgtttcttttgcagcatgagatagactatgtaggtactgatgcacatgtctccccaagagtacctcagcatcctcagattgcaaatccattcgccaattcagttgtcccacctggaactggtttgtatgggcaatcagcagctgggtttgctcctagacccagtgtcactgaccagtcgaagaatacaatattctctaatgccttatcaagcccagtgcgcaggagtctccagnnntctc

SEQ ID NO: 6084 - DNA, 392 bp, Zea mays
ggggttgctccatactaatataataataatcactcctacttacgtgctcaagcttataatattagagtagcaaagctgctacgtactgttagggctctatggactactacgaagctatggacgtgtttggtaggctgcatatgggccggccaggctggtaagatacagcgtacgcttgtttggttgcttgtctctgtatctggtgggctgaggggcggtgtttggttgcctgtatgtctgtgctcacctgcactgcgggatgcaacatctcgctgtgagccaggctgtggagaaacgagtttcatttctgtatctcgggagccaggccctggctagcctgtttggagcgggcaggctccactgcgaaacgaaccaaacacgccctatatgta

SEQ ID NO: 6085 - DNA, 373 bp, Zea mays
gattgtggcagataaattgttcttgtatcgactttttccttcttgcattgttattattgccttgcaaagcatgaaagctaaatctggtgacaggaaatatcccaatggcagagataacttagtggcagtagcgtccaatgtcaccatgcaggatgtttgttttaaaggtggtactttattgaagctttataatagattgtgccctttttctgaatgtaatattggagaacatcttatgtgaaatgtatggatgatggttgcaaatcctgatattgaatagaacttcctttttcgaattatcatatacaaattaatggatatatttgcttatgttttcctcccaaacacgcttcagcagtggtaattatcatga

SEQ ID NO: 6086 - DNA, 1183 bp, Zea mays
ctcttttctgaatggccgtggatgatgaacgtcaggtgtgcgtttgcactatgaggtttttacctaatttcccaaaaagaatgaaataaaaaatgaataaaatagaaacaaggcattctgatttgacattagcatttactgtacagagacagaggatacttcatcttctccctgaatacttaataatatttgtactttgtcgctatatttgtttatgtggcagcggggactggtaaaactgtttcctatatgtcatagtagaatggaagagattgttcccaaagatgctcctgtcaggtgatcaaggccttcctataagttcattgctgtttgaaaattccaactcatttggtactataattcaacaaaacagtttcctggaaaagtggaaatgccagttcaagtagtattaataacaatcctagacttgctgattcactgtaacgcattcattctaggcttgttgctttcaacttgggctaccttccaggaggagataaaactgtaatcacagtgcctaggacaactgagttagcattgcgagctgccagcagaattctcagttctgggggactcataagtgttcttgtatacattgggcatccaggtggaaggtaaacaccagttgcaaacattgtagtctatccatttagaaaagaatgcaattgtagcacaatgtctagttaaatcatcgtaagtttgactaactatgtataaaagaatatcgatattatgatatcgaataaacatcattagatttgtcatgatatatgttttcatattgtacctattcggtgccataaaatttgatacttttacatatatatttgattattttgatgttttaacaaagaatgcacctagaattgcattccttttttagacagagatacccatgtggtgtaatattatttatttatctgtcaccaaaattatgtatggtgtactcacaactctagattctgaacaaggaataattcttgtatgaataaaaaaacgtttgctgtttgttctgcatgatctgacttgccaccacaaccttgttgtttaacagaacactgaaatctggtcaaatatggcttaaagaagtggctgcgggcttattgattttcttctctctgatccctagggatgaactcgatgttgttgaatcattttcatcaagccttcctgggatacctgg

SEQ ID NO: 6087 - DNA, 366 bp, Zea mays
  misc_feature (358)..(362): n is a, c, g, or t
tacgagtctcagctgatgaagattaataggtgcagagaggtcggactgaagtgcattgagcgggatccgaaacgtcggcctaccatgggaaatgtccttgagatgctaagtagctagagtgacaggcaccgatttgaggtgttctcggttaggagtggattgaagcggattagagataatcaaatctcttgctagtcaaaactgaatagaaatgggtttactttccctcaatcccctcctacctatgcaaccaaacaaggccttatgggtttcaacaatttggtttgatgtattgtcacaaattgatcatttgtaacattcaagatttatgcgcaaatgtattggcgtgtggattagnnnnnagtt

SEQ ID NO: 6088 - DNA, 607 bp, Zea mays
gaggcagatggatccttttctccacagctaatgcatggcaatgaagatgaagatgcaattgatcctgaagaggacaaagctgagctggtagagtcctgttttttatttcttattaaaatagaaacgtgattggaactgtaatagttatttgctgaaatgcagttaactgagtagtttaattgtcaagtacagatcattagtaaccagactccaatttatgcaacaaagtaggctaaccaacaatattaggacaaaaagttctactgatatttttttcattaggacaacctttcaaactgctgcaggcctccctgcatctccttcattgattcatttagctcccatcatttttaccctaagagagggcttaaatttgagggctttcaagtgttcatatacaaacacaatgagtgaatgtttttcttacgaacaagttattaggattcattttatgagttgattagataattaggatgagggtgacaattcatacttaatgcttttatataattatctccaggaccgaaaacgtgaagctgtagttttggagcatcaaagaaaagttcaggaagccatgaaaacaaaggcaagagtacctgatgagatg

SEQ ID NO: 6089 - DNA, 409 bp, Zea mays
tgtgtgtagtgtatatatataaagtcgtgccacccatctaccctgcatcgaacaccaatggcattcttgcattgaaggaaccctccctccacctccaccgcccgagagcgagcggccggacggggttttggttgggcatggctgccccggcgatgctccaagtggtgatcctcgccgcggtcctccttctcccgttcctcagcgtgccgggcgccgaggcacagaccaagaagttctgcctcacgcagttcgccatcgctagccaggcctgcgccatcctgccacccaccagtcctgagcaccaccaccatcatcacgatgacgaggacaatgacgaggacaacgacgaagatgaggacgaagacgaggacaacgatgaagatgaagacgaggacaatgacgacgatag

SEQ ID NO: 6090 - DNA, 447 bp, Zea mays
ccgatggcgtccgaaggcggcatgggtccgcagatggctggcatggcgccgacaagcagcccgccggtgagttcagggccgccgacggcaggttcacacgtcggcagtgacgctcttgcacaggtcgcttatctctgcctcgtcgccagcctgctgtggtagactggtacgtagatgggctgcctgcgactgcgagacagctagaggatactctagcagagcttgttccgaaaggggattcttttgtacggaagcagtcagttattttttctgcgcggcgtgtaattttttttgtcatccttcgttctatctgtcgtccatcatgtattatcgcgaactcatgcaaatacggagtactgtattcgtctacgaaggaaggtgacaatggccggggattgtgtaggatcggagctattactgtaggtctaattgaggacgacacgagat

SEQ ID NO: 6091 - DNA, 474 bp, Zea mays
cgcgttctacctctatgccgccatcgccgccgcgtcgttcgtgttcgtgtacgcctgcctgccggagaccaggggccggagcctcgaggacatggaagagctcttccacaccaagtgatttcgtatgtgctgatccaacaaccatttggttcaattctcgattcagtggcaatgcagattttgccattgttggagctggttttgagcttggtcgttatcatcatggcacatgcgtatacaattgcaagattatattgaaatcgattgattgagccggttggcgtcgacatgggaacacgtgcatatatagaattgaagcattgtaaatttgcattctttgacgaaatagattttttcttcaaagggaacataacagaggcctttagtacacatactacataatcatggccatttattttagattcaacatttcttttatatctatctcttcgtacacagaacaaggtgaaagtg

SEQ ID NO: 6092 - DNA, 694 bp, Zea mays
  misc_feature (587)..(589): n is a, c, g, or t
  misc_feature (591)..(600): n is a, c, g, or t
  misc_feature (602)..(620): n is a, c, g, or t
  misc_feature (634)..(637): n is a, c, g, or t
  misc_feature (658)..(659): n is a, c, g, or t
  misc_feature (662)..(666): n is a, c, g, or t
  misc_feature (668)..(670): n is a, c, g, or t
  misc_feature (673)..(673): n is a, c, g, or t
  misc_feature (675)..(680): n is a, c, g, or t
  misc_feature (685)..(689): n is a, c, g, or t
ctctgatcgatgctgcagcccgccgaggttgctggtcgacgggccctacggcgccccggcgcaggacttcaggaactacgacgtgctgctcctcgtcggcctcgggatcggcgccacgcccttcatcagcatcctcagagacctcctcaacaacatcaagctggccgacgagctcatggtacgcgtaccaccgtctcgtctcgtctgcattgcagctgtagcgtgtgtccggtttctttactttctcgtcgtctgaacctttttttttccatttcaggacctggcaatggagaccggccgggccgaggacagcgccagcaacctgagcggcgcgtcgacggcgagcggcggcaacaagaggagggcgtaccgaacgacctgcgcccacttctactgggtcacgagggagcctgggtcgttcgagtggttcaagggggtcatgaacgaggtcgccgagatggacaagaaggtgacgacgctggcctctctgcctttttttttctttccgttcgtgcgcgctggtttcctgatggttttggcaccttgccggccagggggtcattgagctgcacaactacctgacaagnnngnnnnnnnnnngnnnnnnnnnnnnnnnnnnnagaggccagcgtcnnnnccttcttgtccatctcggcgnnctnnnnntnnnccncnnnnnnactcnnnnnaacca

SEQ ID NO: 6093 - DNA, 360 bp, Zea mays
cgcccgctccatattcaatctcgtcgtcgttccgcgcgtcagcaaaagatcctaagaatcgggtgaagacgaagctagcagcatggtattcaccaagtgcgtgataggaagctcgagccaggatttatcagcattcgtacgagatttgggtcgtgtttgatgctggtgagccgatttataatttttgtaagtttatctgatgattggattaactagaattattagtcgtaataatcctcgtatttagcgcaggcgcgttatggtagtgttaaaaataagtgaagaacgatgggtttagtaatgtgaaaggtagattaatttagggatatctaagcgaggtgacgacgtaaaggatagata

SEQ ID NO: 6094 - DNA, 1003 bp, Zea mays
agttagaacatacaccggtatattatctgcagtcaattagttttcaattactttttatcgtattaaactgttgcaacggttttccagtctcatgctacgctcctggagcaggtcaacgagaaagcatttgaacttgaggtacataaactctcctcagagcatgcattaaaaagatggatagtagtttacccttgtttatggtgaacctggaggtggagtcaaaggaatcagagtagagaatatagaatgaaagccccaaaatgcttcatgtttaattttctcattcttgtcaaccatataactaatcaagagcatttgaggtaacttaatttttcccttatgtgcatcatggttaataagttcccctagtctagcctagcctaggatccttgaccctcaagaggtggcaaagtattaatagatactccactacagtattgttttttcagtgtttgtgtgccattcttgttctgcctgtattttataaaggctcctttttttgtttattgcaggtgaagacagcagataacagaatattgcaagaccagctacaacaaaaggtaacagtttgattgtaagttaaattaaccaaaaagcacaatcttatatcattccacattgtcttgttttcagacgagagagtgtcaggcattagaagaaacagttgcccacttacacgaacagctttcccaagctcttgaagctaatgatttattgtcagaaagcatcatatttcagcagtacacagacaacaaccttcaaactggatcgcaaattcacaaagaaaatccagaatctatagatatctctgatgaactgcatcagaaggcagagcaggtttgccttttctctgcactaaggatcaaaatcatttcgatcaactacagagtttttgttgtagtagttattgtgctagatttgaggaatttgactaacattatctattctctcaccagtcagagattagactaacattatctatctctcaccagtcagagatgag

SEQ ID NO: 6095 - DNA, 392 bp, Zea mays
cggatgcagcgggaggaggggaaggtttctgacaagtctagttcagcgtgggcttctgaggcggtagctacaatggagatgacacactcgaagctcttccccttcttcatgactggtctccttccccaggaggccatgcaatacttggacctagtgtgccgatgcaccaagaacacgcgccatctggtctccatgctcagatctcttgcagagcgtctggaagatgcgaacccgtcaattatacacaacaacccaaccaaactgtatgagcacctccttgtaaagtccccataagcctcaaactgctctgcgcagcgatgcggtgctaacctttacttttcctgtcagtagtgcagcttatgtatttcgggttatttgaacgattgtgaaag

SEQ ID NO: 6096 - DNA, 919 bp, Zea mays
gttatccagaggcgagctacctgatgaagaaaacaaaaatggtactatattcatagcatctgagcatttagtgcataggcatacaacacgatgaatatgaattgagctttcaatataagatattgaaattttaggtgctgggttattgtataccagtaggcacatgaaacggagcagtcctaggctatgccagggccaacatatttttcatgctgtgaggtactgttcatggtgttcttaggattaaatttgttatttaaagataaggttagattgagttgattccttgattttagagaatggtctcttaaaagacaagttactcatccatgtgaggatggaattctggttaatcaataaatgacaaataagtggatctagactatctccttatctattcctgtccttgcggtgtagttgatgggaatcggcataagtgcactgcttggatgaagggccatcgaatttatgcccttgacatactatcttttatgttcagacacttcattaatttattaggtacctgatttgagatctcaagtaaaaaaatccatgatacctattgtttgatacttgcttgatacaagtttcggacaatattcatgacatggtgagatcagtgaacatcattgccaatagcccagtagtgatatcaatatatcactgaacttcttggcttcagcacattttcctctctttgtaatatattattgaacttctcgactttaacaccttgatttctcgtggcgatataatgtggccgctttggattttgtacaatgacgtgttgtgaccttttgattgacttgcacgatgtggtacatctgcagggaagttcatgaggaagtaactgaggcaaggcagaaggcctcaacggtaagatctcgacgacaagagcaggatgctgctcgtcgagaga

SEQ ID NO: 6097 - DNA, 393 bp, Zea mays
gttagcacaaagccgatacacactatcctgcagagcaactagttgtgcagaactgaagaaaacatatggcaatccggatgagaagaacataaatgtagaatacctgttctaacatctttcaagtcacaatagcaataaaaagagagatagaggaaggtcgaagttgacataaagcagtaagagatttgaaaggatgaaatataccaaagatttagcctatcgctttaaccttgacatatggtttttgttgggtttcaactctagcctacactaacttgccgttgaaacaaatatatctgacaaagctaaccaacaaaacagatgacagcagcatatagaacgcaaaaaaataacttcctgagtacatgtgaggaaaatgattgtcggagaaag

SEQ ID NO: 6098 - DNA, 401 bp, Zea mays
ggctgaaattcagggtcatcactgcaagcttaggggtgaagttagagtatgaagggcaccccaaatcatctaaacaggatgctgaggatctgtgatcggtgattgaaattacattttagtttctccgcccttgctgtttaaagctcttcaactcattggcatcatgaggaactgccgtgagacatcaatggtcagagtccgaccataaccacatatatagttttaacaatgtctcaagttttgtgttattatctgttgtctgttgtctgccatatgtaatagtttccttttagaaggcaaaagcacttccttcccattttctttgaagtacttgtattcctatagtccattcccgatttctttttcgccaattacaaagacaaagataccaagccgaagtg

SEQ ID NO: 6099 - DNA, 385 bp, Zea mays
ttaccgtcgtctttgcgattgtatttacagtatacgcaagacgagccctggacaacatggaacagtccgaagtcgcctgcgctgaacctgtcgtcggtgaccctgctggatcgaccgagtccagagatcaccttcagggatgttcgactgcacgttctgtaccaatcgatgttgtgtaatgacacaggtacagtacacgtctaaacgactggttgacttaaagttcctttgttgtacatacacaacacgatagatcggtagaagggagatcttaacaatgtgtgtaattgttaattgttacgtactactgtaagtctgtaaatatgttatgacctgatgctgtgttcagccacacgcatgttgtgtgattgttgttgcttcacag

SEQ ID NO: 6100 - DNA, 690 bp, Zea mays
aaggaatttcacctatctactgaagtgagttttattagcttgtttaaatggaccatgcaatcattttggatacctaacaagtttttaaatgctcggagcaactttttgttcatttgataatatttgatgaatttgacatcgtgacgctttcgtgctgtcaatctcttattcccggacatgtgaaacagtgagcaccgctccatcggtggctaccagtgcctgttcgctgtggatggattctccagagtaaaacttacgccccaaatccccccgctctctctggtatggtaactatagcccatcaaacagagtatgcggattcaggatcctgcaacagccatggtgccagcaaccattgtatcccgtattccgtcaagaatttactgtctccttgtttgcacgttttggtgcaggtgaaagaacccaaggtgtttgcacatgggaatacgagagaccctgacattctttcactgagttggcccggttgtccttgagggcatggggacaccggacacccagattcctgtggcaggaccactaactgccagcagtgaagatgtgtttgagtcagtccgcgtgacacatatatggtatacatctctgggtcttgccatgaagctaccttacctgcaaatctagaatggggcccctcctcccctagatcccacggcttcgaaaccacagctttaa

SEQ ID NO: 6101 - DNA, 401 bp, Zea mays
tggatttttcaaaactccaatctgatgagaagtgccacattcttcttgtgcaagctctcaggagtcaactaagagagtttggttctgtggtggctatagttgacgcgagctgcttagctggaataaggagacattggaacacccctgttccttcagaaatcactcaattagctagcagatgcttcaatcactatggtgctgaaaatgatgataaaattgaggtaccttcagcagacgacactgacaaaaaaagttggatatctgagaaacctgtggttgctgttggtgcaggagggacagcactcctgggcttttcatcattatcgaaatctcttcaggcttctgccttccttaagatggccccttacaaaagtccagcggttctgaagtatggattaatg

SEQ ID NO: 6102 - DNA, 474 bp, Zea mays
gagtgacagccagggatccactcatcccctgggtggaaaaattcaggttgtggattggattgctagctaccgaacaagccctcagcgtgctaatttcagtggaatcttggtagacaccactgaacttcttggttttcaattaaggtgcgcctacatttcatttccatattgtttattcttcaaataggtcaaaaaattctgattctccatgcctccctcctgttattctgagttctgaacagattctttttcgatatgcagttcgagcatagagatcgtcttctctcacactgagttgccagtttattccgaaggtccttcaagctaagttctgatgatggctaaggccaatggagcagtccatgcatccacgaaggaacccttgttttcttttggtgtcatagctgatgttcagtatgctgatatcccagatggtcgctcattcctcggtgtcccaagatactaccgccatag

SEQ ID NO: 6103 - DNA, 377 bp, Zea mays
cacctttatatacccgaacagttcaaatgcagcaatagtttgaaacgacaaatccgtaggctcagccaaaatcaaaatcattagatactataccctactataacatgtcatattatacagaaacagcaggaaggaattgtaacatccagtgatgatgttctttttgttgcactacggaagcttgccagatttgagagcctcaaagcgtgcagtgagagtttcatagtcaagaggcatatttggatgaacacgagaatgaaggtttgtcttcggcaattcagggaaatcttgatcaggctcttcgtcttctgagtgacgattttctgaaaacagctcactcttaggaggcaatggcctttccacagactgaatttcca

SEQ ID NO: 6104 - DNA, 1413 bp, Zea mays
  misc_feature (417)..(419): n is a, c, g, or t
  misc_feature (656)..(656): n is a, c, g, or t
  misc_feature (658)..(659): n is a, c, g, or t
  misc_feature (663)..(664): n is a, c, g, or t
  misc_feature (666)..(675): n is a, c, g, or t
  misc_feature (678)..(678): n is a, c, g, or t
  misc_feature (680)..(694): n is a, c, g, or t
  misc_feature (701)..(711): n is a, c, g, or t
  misc_feature (719)..(723): n is a, c, g, or t
  misc_feature (725)..(738): n is a, c, g, or t
  misc_feature (740)..(746): n is a, c, g, or t
  misc_feature (750)..(754): n is a, c, g, or t
  misc_feature (756)..(757): n is a, c, g, or t
  misc_feature (768)..(768): n is a, c, g, or t
  misc_feature (770)..(776): n is a, c, g, or t
  misc_feature (780)..(784): n is a, c, g, or t
  misc_feature (787)..(791): n is a, c, g, or t
  misc_feature (796)..(801): n is a, c, g, or t
  misc_feature (805)..(811): n is a, c, g, or t
  misc_feature (814)..(831): n is a, c, g, or t
  misc_feature (833)..(838): n is a, c, g, or t
  misc_feature (841)..(851): n is a, c, g, or t
  misc_feature (855)..(856): n is a, c, g, or t
  misc_feature (859)..(867): n is a, c, g, or t
  misc_feature (870)..(870): n is a, c, g, or t
  misc_feature (873)..(874): n is a, c, g, or t
  misc_feature (877)..(878): n is a, c, g, or t
  misc_feature (886)..(886): n is a, c, g, or t
  misc_feature (889)..(890): n is a, c, g, or t
  misc_feature (893)..(896): n is a, c, g, or t
  misc_feature (905)..(918): n is a, c, g, or t
  misc_feature (920)..(951): n is a, c, g, or t
  misc_feature (954)..(955): n is a, c, g, or t
  misc_feature (959)..(988): n is a, c, g, or t
  misc_feature (991)..(994): n is a, c, g, or t
  misc_feature (996)..(1006): n is a, c, g, or t
  misc_feature (1008)..(1011): n is a, c, g, or t
  misc_feature (1016)..(1033): n is a, c, g, or t
  misc_feature (1037)..(1055): n is a, c, g, or t
  misc_feature (1058)..(1063): n is a, c, g, or t
  misc_feature (1065)..(1072): n is a, c, g, or t
  misc_feature (1076)..(1089): n is a, c, g, or t
  misc_feature (1091)..(1096): n is a, c, g, or t
  misc_feature (1102)..(1107): n is a, c, g, or t
  misc_feature (1111)..(1126): n is a, c, g, or t
  misc_feature (1128)..(1134): n is a, c, g, or t
  misc_feature (1139)..(1139): n is a, c, g, or t
  misc_feature (1141)..(1144): n is a, c, g, or t
  misc_feature (1146)..(1155): n is a, c, g, or t
  misc_feature (1161)..(1162): n is a, c, g, or t
  misc_feature (1166)..(1168): n is a, c, g, or t
  misc_feature (1170)..(1181): n is a, c, g, or t
  misc_feature (1193)..(1193): n is a, c, g, or t
  misc_feature (1196)..(1200): n is a, c, g, or t
  misc_feature (1206)..(1216): n is a, c, g, or t
  misc_feature (1221)..(1221): n is a, c, g, or t
  misc_feature (1223)..(1225): n is a, c, g, or t
  misc_feature (1227)..(1227): n is a, c, g, or t
  misc_feature (1230)..(1236): n is a, c, g, or t
  misc_feature (1240)..(1240): n is a, c, g, or t
  misc_feature (1242)..(1242): n is a, c, g, or t
  misc_feature (1247)..(1257): n is a, c, g, or t
  misc_feature (1260)..(1265): n is a, c, g, or t
  misc_feature (1267)..(1268): n is a, c, g, or t
  misc_feature (1271)..(1273): n is a, c, g, or t
  misc_feature (1275)..(1278): n is a, c, g, or t
  misc_feature (1284)..(1284): n is a, c, g, or t
  misc_feature (1286)..(1288): n is a, c, g, or t
  misc_feature (1293)..(1301): n is a, c, g, or t
  misc_feature (1303)..(1306): n is a, c, g, or t
  misc_feature (1309)..(1324): n is a, c, g, or t
  misc_feature (1345)..(1350): n is a, c, g, or t
  misc_feature (1355)..(1375): n is a, c, g, or t
  misc_feature (1377)..(1382): n is a, c, g, or t
  misc_feature (1385)..(1395): n is a, c, g, or t
  misc_feature (1398)..(1408): n is a, c, g, or t
atgtaatgagtttaggaatactatttgtgcatatcaacattggaaagaaggaatggacattgaagtgtcccatgtaaaaagaaaagaaattcctttgtttgtttttcctggtggagtgcgtccttctcgttcttctagaacagcgcacaagaagagccgtactattccaacatgtgatgtttcagctgatgatcaggtgggaaacctattgggcgttgccagttgtagtgatgctcaacctgtaccatgtaaaggcagctatacgaaacagccagatccaaattgcgctggaggctttcagttgccaggaagtacttctgtgttgcctcctagcttacccaatgaagtagttttgaatgggtctgctaattttcatgaagaatctgttgagcgtgaacatccagaacactatcaggnnnatgaagtgttggacgcatgacatgcgcatcgcatcatccatcttgcattttgaagttatgtcatgatcttatggtccgaccgtaccggtacatttttagcatcgtacgttggccgaggaggggtacgatgcggcttcatatccttagaggtatgaaggcagaagtcatccttgcatttgcagacatttgcactcatgaggaatatatgaagtgtgacattactatgttactattgcngnntcanngnnnnnnnnnnggnannnnnnnnnnnnnnnagattannnnnnnnnnncttccccnnnnncnnnnnnnnnnnnnncnnnnnnntccnnnnngnntcgaggccctncnnnnnnnaccnnnnnccnnnnncaaannnnnnaagnnnnnnnagnnnnnnnnnnnnnnnnnngnnnnnnttnnnnnnnnnnnattnnccnnnnnnnnnccntcnncanncctccccnaanntcnnnntcatttgtnnnnnnnnnnnnnnannnnnnnnnnnnnnnnnnnnnnnnnnnnnnnnccnntctnnnnnnnnnnnnnnnnnnnnnnnnnnnnnnccnnnncnnnnnnnnnnncnnnntcaannnnnnnnnnnnnnnnnnagtnnnnnnnnnnnnnnnnnnnccnnnnnntnnnnnnnnatcnnnnnnnnnnnnnntnnnnnncaattnnnnnnctannnnnnnnnnnnnnnncnnnnnnntcttnannnncnnnnnnnnnntctctnntcannncnnnnnnnnnnnnccccctcttttnccnnnnncctccnnnnnnnnnnnccccntnnntntcnnnnnnnctcntnctgcnnnnnnnnnnnccnnnnnncnnatnnntnnnnttttcncnnntaccnnnnnnnnncnnnnctnnnnnnnnnnnnnnnntcaaacactacctttctcttnnnnnnatatnnnnnnnnnnnnnnnnnnnnnannnnnnaannnnnnnnnnnctnnnnnnnnnnnatcta

SEQ ID NO: 6105 - DNA, 498 bp, Zea mays
tgatggaagaagtttgagggtgaactctgggccgccaccacccagagatcggtcatcaccgtcaccgcaaagacccaggggtgatgccaacagggtctacgtgggtaacctttcctggggagttgacaattcagctctcgcaaacctgttcagtgagcaaggtgaggtactggaagcaaggatcatctatgacagggagagtggaaggtcaagggggtttggttttgtcacgtacggttctgccgaagaggttgagaatgcaatatctaatctcgatggcgctgtgagttctgaatcactctttttttccctagctgctcacgccacagccttcgaaagttgaagtctagtcgtctttcaggatgtactgaattggtttaccattaccctgcaggacttggacggcagacagatccgtgttacggtagcagagtcgaagccacctaggcagcaatactgaaattcctcttgagatttttgtaggtgtaccggtagccc

SEQ ID NO: 6106 - DNA, 367 bp, Zea mays
tcttctttatgcatgaaagttgttatatatgctcggtgcaggtgaacagtcatgcagcaggttggtatatgtttcacaaaaagaactagggttttcaaaccctctacataaatatttgaaaaaaacatgtagactgaagaaaacttagcaacctgtctattcaattctagttgctatgagaatatttacttgttagcagtaagcacttataatcttcgaaagattggtttctcagtctggtttttcttaacagtagtacagcacataaaatggaaaataaatatacttctacaaagcgctgaacaagaagaaataacaatgtgtcagcaagaaaatttgatgatacatacattctttcatgcacagg

SEQ ID NO: 6107 - DNA, 864 bp, Zea mays
gcatttcttcctctcagagaaggatattgggcaaaaccgtgctcatgcttgtgttccaaagctacaggagcttaacaatgctgtcatcatctctaccgtaactggtgatttgaccaaggaacaactttctaactttcaggtacatgagcatggaatgatctgtggtttgcttaagtgtttgttgtataaaaatgtgtttagactctaaattgaccaacaatcaatttaaatctatcagttcagtgacaaaaagtcatgcaaattcctattaacaacatattgaaagagaagtttacatcctagaacattgtgccatttgaaacatgtcttacaaaaatgggcatagggagtattccaaaggttctattaatgagtcagctgctaagtaaaaagccaccaaatggtttatctgcatctgttgacacatcatcatgttaatgcatttttgttgcatatattcttccatgctagcattgtgcgttaggttagctaattttaaatgcttaaactactttattttagcctgcacactccatagccagataattatggagctggtgctttcccagatagggcttcacttgaaaatatttttcttgttaagggggattagttgatttaatgtattgagcctttttgggatattttaatgtgtttcttgattagactgtaaagatttgattgccacatattctcgaactgataacttcctggtcaacttacaggctgtggtctttactgatatcagcatagaaaaagcagttgagtatgatgaatactgtcatagccaccagccgccaattgctttcattaagtccgaagtttgtggcctttttggcagtgttttctgtgactttggtcctg

SEQ ID NO: 6108 - DNA, 379 bp, Zea mays
ctattcaattttgaatagcccctccaattcccttcgttccgctccaaaacgaacatgcccttacacgtatcttacacatgtattcgtgctgtaaatttcgcatacaaaactacttccgtcaaggattctttcttacttacaattcctgacgctccgcagtgcatgcacaggctcacgagttatttacttgttactgctgacgaagcgattatacaagaaacatggaaaagatatcattttttaccttctcatgtctcgtgcccggcacacacaaaaacttggcaaaccaacaccaaccttcactcctccaagctcccagctcccaaagctgcaagtttcaccagaccaccgatggcctcgtcgtcggcctcagtcggtt

SEQ ID NO: 6109 - DNA, 723 bp, Zea mays
  misc_feature (705)..(707): n is a, c, g, or t
ccaccgttggcatcacggaccatgctcaggcgagtgaactagtagctggcgacattatatatatatatacttgcgatacagcttgcttgttctccgtcagctcagctcttctagttctacttctagctagctgacgcgaagtgacgagcgagtagttccaagaaaacattaaaagctagctagggacaaacatttcgttattattattatacaataataatgttgttacatgcagggccacctgggagaggtggtgttcgtggagctgccggaacccggcacgaaggtcgccgcgggaggatccttcggcaacgtggagagtgtcaaggccaccagcgacgtcaactccccgatctccggcgaggtcgtcgaggtcaatgccaaactgtcagagacgcccggcctggtactgctagctactgctgctgctagtttctgctagtttgctactactccatgcatactcctaatcctcgacaataacgcaataactaaactctcgacaataatgcaataactaaactcctaacgcgtgcagatcaacacgagcccgtacgaggacgggtggatgatcaaggtgaagccgagcagcccgggggaggcggacgccctgctggacgccgccaagtacaccaagcattgcgaggaggaagacgctcactagacccaggcccggcccagcccagcaagcgtggatgcttaccnnngacagcgcgcgttttg

SEQ ID NO: 6110 - DNA, 1502 bp, Zea mays
  misc_feature (476)..(486): n is a, c, g, or t
  misc_feature (488)..(491): n is a, c, g, or t
  misc_feature (497)..(499): n is a, c, g, or t
  misc_feature (502)..(505): n is a, c, g, or t
  misc_feature (507)..(507): n is a, c, g, or t
  misc_feature (509)..(532): n is a, c, g, or t
  misc_feature (535)..(540): n is a, c, g, or t
  misc_feature (542)..(556): n is a, c, g, or t
  misc_feature (558)..(564): n is a, c, g, or t
  misc_feature (566)..(584): n is a, c, g, or t
  misc_feature (586)..(589): n is a, c, g, or t
  misc_feature (592)..(592): n is a, c, g, or t
  misc_feature (595)..(600): n is a, c, g, or t
  misc_feature (605)..(605): n is a, c, g, or t
  misc_feature (607)..(609): n is a, c, g, or t
  misc_feature (611)..(617): n is a, c, g, or t
  misc_feature (619)..(627): n is a, c, g, or t
  misc_feature (638)..(638): n is a, c, g, or t
  misc_feature (640)..(640): n is a, c, g, or t
  misc_feature (642)..(642): n is a, c, g, or t
  misc_feature (647)..(650): n is a, c, g, or t
  misc_feature (652)..(655): n is a, c, g, or t
  misc_feature (657)..(657): n is a, c, g, or t
  misc_feature (660)..(660): n is a, c, g, or t
  misc_feature (662)..(667): n is a, c, g, or t
  misc_feature (675)..(684): n is a, c, g, or t
  misc_feature (692)..(692): n is a, c, g, or t
  misc_feature (697)..(722): n is a, c, g, or t
  misc_feature (725)..(733): n is a, c, g, or t
  misc_feature (738)..(744): n is a, c, g, or t
  misc_feature (749)..(752): n is a, c, g, or t
  misc_feature (755)..(759): n is a, c, g, or t
  misc_feature (761)..(761): n is a, c, g, or t
  misc_feature (763)..(780): n is a, c, g, or t
  misc_feature (788)..(794): n is a, c, g, or t
  misc_feature (797)..(807): n is a, c, g, or t
  misc_feature (810)..(810): n is a, c, g, or t
  misc_feature (813)..(838): n is a, c, g, or t
  misc_feature (840)..(840): n is a, c, g, or t
  misc_feature (842)..(842): n is a, c, g, or t
  misc_feature (844)..(849): n is a, c, g, or t
  misc_feature (854)..(857): n is a, c, g, or t
  misc_feature (862)..(876): n is a, c, g, or t
  misc_feature (878)..(882): n is a, c, g, or t
  misc_feature (884)..(903): n is a, c, g, or t
  misc_feature (905)..(905): n is a, c, g, or t
  misc_feature (907)..(909): n is a, c, g, or t
  misc_feature (911)..(920): n is a, c, g, or t
  misc_feature (922)..(930): n is a, c, g, or t
  misc_feature (938)..(939): n is a, c, g, or t
  misc_feature (941)..(950): n is a, c, g, or t
  misc_feature (955)..(959): n is a, c, g, or t
  misc_feature (961)..(976): n is a, c, g, or t
  misc_feature (986)..(988): n is a, c, g, or t
  misc_feature (997)..(999): n is a, c, g, or t
  misc_feature (1001)..(1003): n is a, c, g, or t
  misc_feature (1009)..(1016): n is a, c, g, or t
  misc_feature (1018)..(1021): n is a, c, g, or t
  misc_feature (1023)..(1027): n is a, c, g, or t
  misc_feature (1030)..(1033): n is a, c, g, or t
  misc_feature (1037)..(1051): n is a, c, g, or t
  misc_feature (1053)..(1065): n is a, c, g, or t
  misc_feature (1069)..(1074): n is a, c, g, or t
  misc_feature (1076)..(1077): n is a, c, g, or t
  misc_feature (1079)..(1090): n is a, c, g, or t
  misc_feature (1092)..(1110): n is a, c, g, or t
  misc_feature (1112)..(1114): n is a, c, g, or t
  misc_feature (1133)..(1134): n is a, c, g, or t
  misc_feature (1137)..(1158): n is a, c, g, or t
  misc_feature (1160)..(1163): n is a, c, g, or t
  misc_feature (1169)..(1169): n is a, c, g, or t
  misc_feature (1171)..(1174): n is a, c, g, or t
  misc_feature (1176)..(1177): n is a, c, g, or t
  misc_feature (1182)..(1182): n is a, c, g, or t
  misc_feature (1186)..(1197): n is a, c, g, or t
  misc_feature (1200)..(1208): n is a, c, g, or t
  misc_feature (1211)..(1213): n is a, c, g, or t
  misc_feature (1218)..(1225): n is a, c, g, or t
  misc_feature (1227)..(1229): n is a, c, g, or t
  misc_feature (1231)..(1232): n is a, c, g, or t
  misc_feature (1234)..(1245): n is a, c, g, or t
  misc_feature (1250)..(1254): n is a, c, g, or t
  misc_feature (1257)..(1284): n is a, c, g, or t
  misc_feature (1286)..(1290): n is a, c, g, or t
  misc_feature (1292)..(1293): n is a, c, g, or t
  misc_feature (1295)..(1297): n is a, c, g, or t
  misc_feature (1301)..(1316): n is a, c, g, or t
  misc_feature (1318)..(1318): n is a, c, g, or t
  misc_feature (1320)..(1332): n is a, c, g, or t
  misc_feature (1335)..(1342): n is a, c, g, or t
  misc_feature (1349)..(1362): n is a, c, g, or t
  misc_feature (1364)..(1368): n is a, c, g, or t
  misc_feature (1374)..(1385): n is a, c, g, or t
  misc_feature (1387)..(1394): n is a, c, g, or t
  misc_feature (1396)..(1399): n is a, c, g, or t
  misc_feature (1402)..(1409): n is a, c, g, or t
  misc_feature (1412)..(1415): n is a, c, g, or t
  misc_feature (1420)..(1440): n is a, c, g, or t
  misc_feature (1443)..(1445): n is a, c, g, or t
  misc_feature (1447)..(1452): n is a, c, g, or t
  misc_feature (1455)..(1461): n is a, c, g, or t
  misc_feature (1463)..(1467): n is a, c, g, or t
  misc_feature (1470)..(1472): n is a, c, g, or t
  misc_feature (1475)..(1483): n is a, c, g, or t
  misc_feature (1486)..(1495): n is a, c, g, or t
tgttcccttgcacaggccgatagaagctaaactaaagcaaatgtgtgcgctattcatctatacctgtgccccacctgttcaacatctgatccaccacaacaatcatagaggcatggccaaagcttccgtgaaagacctgacgaattcgcagtacttatctacgcccggacgccctttgcaagtcataggcaccccaagaaccatgcgttgcaccagttccatactgagaaccagaatcagtggcagcagttgcctgcaatagagaaacagcttcaaatgagaagggatgtgaggactagttctgcagatgataaagtacaggccagagggaatacttgattaatgccatatccagagttataagggtttgcagcataattggccttggggttcccatagcttccattataacctgcaggatagtcgctgcattatgagtagcacacatgccacataaacagagcagggattaccannnnnnnnnnncnnnntccctnnnatnnnngncnnnnnnnnnnnnnnnnnnnnnnnntcnnnnnncnnnnnnnnnnnnnnngnnnnnnncnnnnnnnnnnnnnnnnnnncnnnnagntgnnnnnnatganannntnnnnnnntnnnnnnnnnttggtccttcntntncctcnnnncnnnnanctnannnnnncacccccnnnnnnnnnnccccctcnccgcnnnnnnnnnnnnnnnnnnnnnnnnnnaannnnnnnnnccccnnnnnnnctctnnnnacnnnnnanannnnnnnnnnnnnnnnnnccccaaannnnnnncannnnnnnnnnnacnccnnnnnnnnnnnnnnnnnnnnnnnnnncngncnnnnnnctccnnnnccacnnnnnnnnnnnnnnnannnnntnnnnnnnnnnnnnnnnnnnncncnnnannnnnnnnnngnnnnnnnnnctcacacnnannnnnnnnnnttacnnnnnannnnnnnnnnnnnnnnctcctctcannnaacacacannnannngaaatnnnnnnnnannnncnnnnnccnnnnaccnnnnnnnnnnnnnnnannnnnnnnnnnnnactnnnnnncnncnnnnnnnnnnnncnnnnnnnnnnnnnnnnnnnannnaaccacctcacctcccccnnctnnnnnnnnnnnnnnnnnnnnnncnnnngcaccncnnnntnntcccntgcnnnnnnnnnnnnccnnnnnnnnnccnnnacctnnnnnnnntnnnanncnnnnnnnnnnnnactcnnnnnacnnnnnnnnnnnnnnnnnnnnnnnnnnnncnnnnnannannnaatnnnnnnnnnnnnnnnngncnnnnnnnnnnnnnatnnnnnnnnataatcnnnnnnnnnnnnnncnnnnnaaaccnnnnnnnnnnnnannnnnnnnannnncannnnnnnnctnnnntatcnnnnnnnnnnnnnnnnnnnnncgnnncnnnnnntcnnnnnnntnnnnngcnnntcnnnnnnnnnacnnnnnnnnnncaacctg

SEQ ID NO: 6111 - DNA, 390 bp, Zea mays
cagtttttttcatatctgctgaatagagtggtattttgcttgtcttaggcatggactggaattatgtcctaatggaacaattgcatcggttagatctggaagactttaatggctcctaacattccatcatttcgttttttagctacattttgtctccaatacggcaatacccatgatttgctagctacataatatttttaatttttctaatcattagataataagttcatagtacatgaatactgcaatcagtccccgatccttgtggcatctatgtcaaacactcaactactcaaaacatacattggacaaatgcgtgctcatataatttccttgtgctgaatgttgtgcaggaagactacaacaactggaattactggaaggtgccat

SEQ ID NO: 6112 - DNA, 567 bp, Zea mays
gatctggaccggggagaccagtaaaggcagctcaacagagaccatttggtgacatgaaacctaaacaaactcgagagcatgttgctatcgagagaaagcctatggcaagccagacagatgtaagtacacgcaactaaggcacatgtttttgacgatggttaagacctcatgactcacattatctgttctccttgctgtagaaatcaaggcccggcgctcgaccttcggcaggagccaagctagagttggcaaagccaaaggtttacgatgatggtctggataacaacaggaagctggaagcagcgaagcggaggctccaggagcggtaccaggaagcggagaatggttcgtggtctctattttaacactcaaccagagtattatccttatctgtctgtcactagtagtaggtctctaccgtttcggttcggtttttattgaaccgttccacgcctctgtctgtgcagcgaaaaggcaacgcacgattcaggtaatggagctgggtgacataccgaagcccaagaatcaaaacagacaaccggtggtgaagtccaggaatagccttag

SEQ ID NO: 6113 - DNA, 815 bp, Zea mays
  misc_feature (770)..(771): n is a, c, g, or t
acctagttaactaataggctactgtgctgaagatgatgagaggggagtacaacgccttctagtgtatgaatatatgcctaatggaagtgtggatgatcacttatcaagtaggtcaactactctgtcatggccaatgagactaaaagtagctcttgattctgctcggggactgaagtatctgcatgaagaaatggaattccaggtaactcattagcttcatgatcaccgagaccatcacacttgtacgacttgaaaacatctgtggggcaatagcatccctctgcatctgtacctcacacgacaaataaatggaatatcaaagtatcaaacgctgcactatgctttagttgttctatatctcccctctaaatttaaggtatgcatgcaggttattttccgagacctgaaaacatccaacattctgctggatgaaaactggaatgctaagttgtcagactttggtttggctaggcatgggccaacagaaggtctcacccatgtctccaccgcggtatgcacaattacaagccgactgttagtttattacattagtgtgtttagattgaatagtgttttgtatccttttggaaagtagatactagtatcctgacagtattcaagtgatgaaaggcatattacttgaacaaaaagagaattacggtgaagaaaaaataaacaattagtaagctcttttagctgtacttctataacattattgactttttatgccattgaatttggatactgagttgcttggcctccagaaacannattatttttgtttactacttgcacaagtaacctcttaatgcata

SEQ ID NO: 6114 - DNA, 387 bp, Zea mays
  misc_feature (378)..(378): n is a, c, g, or t
gggcggaggatgtgtaggcgaggtttgctagtcgactagataatgccatacatatgcgtgtctctgcaatggcgcaattccaagcgcgctcttcgttgctccatcgatcgcgcagtgtctgcccggaagacgttctcgattcatacataagaacaacggcagcaatttcaatcaagcgcatcagcacccaaaaacttgtttagcgaagtactgtatgcaggatttgatagctatgtagaattgtgcaggcggtgtgtgctactacgggattgcgatttcaagttcactagagcttgggcatgtgggcaaaacgttgcgaggccgaaatgtcgtccatgtttcttcgccggttacttgggtgtataatgcaactgcccncacatattg

SEQ ID NO: 6115 - DNA, 527 bp, Zea mays
gaaaccttttgctggatcatctcacgccaagggcatcgttctggagaagatgtatgtcagatatgggaatgatctgtgcttttgttatgttgtacttcatgttcttgggctaaggtgtgtttgcttccattgtgtagtggtattgaggccaagcagccaaattcggccatccgtaagtgtgcccgtgttcagctggtgaagaatggaaagaagattgctgcctttgtgccgaatgatggttgcctaaactacatcgaggagaatgtatgtctgttgaccaattcaccttgtaatgattgtcaagatctatgtaatgaaaaagctaaccatctctcttgctgtaggatgaggtgttgattgctggatttggtcgtaagggtcatgctgtgggagacattcctggtgtcaggttcaaggttgttaaggtgtctggtgtgtcgctgcttgcactcttcaaggagaagaaggagaagccaaggtcttagatcactttcggtagtcaagaatggtgtaaactgcccaaggct

SEQ ID NO: 6116 - DNA, 350 bp, Zea mays
tgaagaaggtacacggccctgattttgctgtgcaacagagaacttgatcagtgttgctacatgttctatagtaaatctgtaagttatctgcttattctgacgtcttcttgtagaaccaagttgctcctgctggtgacatgagcagttgcaactcgcaaggcggcgttgtgtgggagtccttttggcatgcaagtgttttgctagttttgacaaggcactcctgtttcttcagtgttcgccgtctcggcggccgaagtgcccaagaaaaaaatgtatttactatttgatctactcctatgtaagttcagtggttcatgtagccaagtagcttggatatctatgaaggtact

SEQ ID NO: 6117 - DNA, 416 bp, Zea mays
ttttttcttctctctccacctgcagtccattgaggacaacatctgaaactatgtgccctgttagttagcaaaaccgttagcatttctttgcactatcacatctcttcatttgacaataagaaggtcgagttgttttgctctgatgagaacttattgtgttcggggatgcttgggagatgttttggaagaagcttattgccttgtgaaacgttctaattgacctgctgataatgggcccagctagctatgctctgctattcttatgtaagatgtgaattgagctattcaactgctagtgtttttacatattccttgccccttttcatatggatcatccagaccctgccaatgctcctcgccttgctctgttagggcatgttcggtttgatctggagtgagggagattagagggataa

SEQ ID NO: 6118 - DNA, 605 bp, Zea mays
gagtcatcctgatcgtgtcccaacgcatctgaaatcgcaggctgagtcaaaattcaaggaggtaaggtaaagttttagataatctgcgagcagatatgaaaatgaacccatattttcttttcaagatcgtatatttgtttgtttttcttacacatagatagatgcaaaccattcccgaattgtgtgacgtctgaattggatcgattgcgcaaagtatcgtaacataattcctgagtcctgagcttactctttcctccaccgccattacaaaaccgtctgcttttgcaccttgcagatagcagaagcatattcttgtttgaaggacggtacgttgttaaccactcagataattcgtattttgcttcggcaaaaaaaagaactactgcaagcagtaaggtattctctgacgtgtgctgtgcactgatgagtcgtatctcgtccatcgtttgcaggaagaagatcagggagtaggatggaaggtgaactagattccatgatggacatgattcacacaatctttgtttgtagttgtagctaattacatgtatcatcgttcacgcagttcatgttatgcgttctggtgttccaactagccacggaagatc

SEQ ID NO: 6119 - DNA, 376 bp, Zea mays
ctctccagccaagtggaaggcatggctgcctctggccgagctgtggtacaactcttcgtatcactcatccttgcaatgctccccattcaaggcattgtatggatatgaaccgaaattaccttcttttcctgtgctggctgatgtttccactactgatcttccctcactgatcaaggaaagggatcttcatctggaattattgaaacacaacttgctggctgcacaaactcgtatcaaacttcaagctgataagaagcgtattgatcggcagtttgcagaaggggagatggtacttctgaaactgcaaccttacacccaatcctctgtggccagtcgaccctttcctaaattggccttcaaatactttggtccttaa

SEQ ID NO: 6120 - DNA, 340 bp, Zea mays
gagttctggttcatgggttttctaatgtacgacaaggctgcaaccagtcttcaagaagccttggctagcgcacgtgagttgcaaccgtgaagacaccggggtaaatggtgtttcttccggttacatacatcagtttccacatcttgagttcaggctgggtcgcaaggattccttagctttctgagtgtctcctgtttcagatccttttagctgaagcctttgacacggtacactcactagcttgcatacgcgtcagaaatgtctgttgttcctgtcaatgttgtaatcatgagatgtatgtggagaaagaatgcatgtcaaacatttaaatgtggcagaa

SEQ ID NO: 6121 - DNA, 481 bp, Zea mays
cctctccggtggcaccaccatgttccctgggatcgctgacaggatgagcaaggagatcactgccttggctcccagcagcatgaagatcaaggtggtcgctcctccagagaggaagtacagtgtctggatcggaggatccatcctggcatccctcagcaccttccagcaggtaaacaaacaaacaaacaaacaaatttcgcatttcctcaatcaaggtcgatctatctatctatctgcctgctcacgattttgcttgcgactgcagatgtggatcgccaaggccgagtacgacgagtccggcccatccatcgtccacaggaaatgcttctaattctttgggcccgagaaatgcaagccgtgggggagccgttaccgccgccagcctctcctgcccccgttttcgttgccgtttcttcattagcgcgaacaaagttttgtgccggtctatcggccgccgctttcctcccctattcatcaagac

SEQ ID NO: 6122 - DNA, 496 bp, Zea mays
tacacccgtcttacgtgagcagtctaaacccgtccgtcgtcggcgcaggagaactctggttctgaacccatttcccccctgaatgtttgggcgcaggtgacgctgccgttcttcgtcctgcacggcgaggccgacacggtgacggacccggaggtgagccgcgcgctgtacgagcgttcggccagcgccgacaagaccatcaagctgtacccggggatgtggcacggcctcaccgccggggagcccgacgagaacgtggaggccatcttctccgacatcgtgtcctggctcaaccaccgcagccggagctgggccgtggaggaccgccttcttatgaccaggaagctggcgccagctccggccaagtccatcgaaggccacggcaccgtggacggcaaagtgcacacacaacaagggcgccctcggcggcgccagggcttcctctgcgggcttgccggccggacgcatcaccacgcggagatgtgaaagatagaat

SEQ ID NO: 6123 - DNA, 494 bp, Zea mays
acagaagaagagagcacaacgcatgcaatgactgacaggctgttttgtgacattttaggtcgctgcaaaaggtgggtaccaagcctgctgcgatgatcaacagcatgtcgtccacataataatctagataatcaaggttatagtaacaccaaagttgccagggcttgtcaagcacacaacatctcctgtacaaaatctgcatgcagagtacgagcctcgtatatccatgcaagatgatatgtagcttcccagcctgataagagtcagctagtcctaccgcaaggcagataacctacagggctgagagataagagaaacatgttagtagcagtgtgcattgtaacctccctactacacccatgacaaggcagtgataatttgatctagaagcaagcaaaaatatttgatgcagcggtaatacctactgattgtcgtatccatccacttcaatctacttctgcaagcatgtgcccacaacctgtgaaatatgatct

SEQ ID NO: 6124 - DNA, 471 bp, Zea mays
acgtacacatataactgagtaaactctgatagtggcgggcgcatttggttgtctccatctgatcagcaagcagagccgacagagcacctgagaacgccggcatccttggtcagcgacttcacttggttggagctggctgccgcgaaggcctggtgcttgttgtaattcggccgcaccctgctacccgtctgcttgaagacagcgccgttcaggaaggagtccccgatggaggcccagtcccattccctccccgcgaccggcatccttctcgtcacctgatcaagagaaacagattacgacgtagtacatacagaagctgcagacgacaagaagactgaatgactgataaaagctgaaactgtgagagaccttcttgttatctgctgcggcggaggccacgaacaggttgccctggctcttgacgcttggtcccatgcttcctccaatggcgtagtctttccatcccaagta

SEQ ID NO: 6125 - DNA, 907 bp, Zea mays
gatttggatgtaacaagttcagttcatgcgctgatgctgcaattgttggtctgatgccacctcccttgttagaacttcaggtgacttactgactatcattcttctattgttggtagatataactgttgcataaacttattattatgcctttgccatttggttttatcatatcctgattctcttaaaagctacctttagtggaagttttctgaagccacgattatattgaattcagctgcttttatattgctgggcagtcaagtcagcgccactactgtgccatcacagttggagaggatgctgtagtttcagcatataggtgagtttcactacctgcaatgggttttgcatttctgacatccattatgagttctatggttatggtgtgtccaagacagaatagtgcctgtattattcatgtgcaaatgtactttgtgtattatgtttcccactttaaattatgttgcaagtttgcaacagaaaactagctatgatattgatagtttccattcaaatttgaattgcaatcagttcatactattgtttctctagaagttggcattgggaagttagcagataatgttgccatattgttagttttacacatcttctaacttcttgttattctgtaggttatcagaagatagaaccaggtcaattgttggagcaattttgtcaagaggtgtagctgcaacattttcgacaatatcatctttgtccaaaatactatggcggagtgagccgtcaccacctaaaaagtcacggccaaagccccaatcctttgcaaaaagtaatggatgtagttaagattcagtattattaaaaaaatataccaaaatttattcctgactgttacataaactgcagcatcacccctcacctgcttgaaagactccccaaggaaagg

SEQ ID NO: 6126 - DNA, 379 bp, Zea mays
ctgtacgacgcagtgaagtacaccacggccaacatgatgctgatccaggtcccagtgttaggaacaacgaaggaattctggcgattatctgacaaagcgactaggatcagcagaaaacttgcattgatactgaggagccaccactcagtcggcaagtacctagctgctcctctgcaggtgtccaacatctggattgggaacaatgggagtgtcaagctaaggggggtcggtttcactggtaaaggcttcagcactgagcgtgtgagagatgactacaaacgcatgtccaggatcctgatggcgttaattactctctcgggtggggacagaaccaaattgcctccggactacaaagagttcctcctgctcttggaataaa

SEQ ID NO: 6127 - DNA, 770 bp, Zea mays
actgatggagtcgcagaaggtaataatcctttcaacatcgaacctaataatttaatgtagtactggtggttgagctgaaactattaagtttcttttgagtttacttgcaggttgactacgattttgagtactacaagctggaaatggcagctgatgtgcagctactcactctctctgaggggaaatcaaacatccttccttcagatttggtagtgcctttccggccatcctctgttcccacagttaatgcaggtgctgaggaaactgagagctggaggtggtttttgaccacagtaaggtctcttcctcagtccactgaacctgaaacttaccaggtaaacaccccttactccattctctatctaccaatggcactgatccaaaaccttgatataatttcactgttcttaaagccttagaatatgattgcaaaagatgcatattttaatatccaactataccacttcgcatgacatggttaatgagtagtgtaacgtttgcacttattgcagatgattcaggatgaaatggtcagtgccatgcgtgatgataggagcttgggttgttctgaacttagcaggtctgtattagtgccacagttgaaaacactagccttgctgtttctgtttggccacgaagtctgaatcgtttttgagctcacttcccttcctctgatctgcagatggctaacaatggcacaaataatggcctccagctttggcgagaagagtctttctttggagcactggcagatggtgaaggagcttgag

SEQ ID NO: 6128 - DNA, 798 bp, Zea mays
  misc_feature (639)..(640): n is a, c, g, or t
  misc_feature (652)..(652): n is a, c, g, or t
  misc_feature (656)..(686): n is a, c, g, or t
  misc_feature (688)..(694): n is a, c, g, or t
  misc_feature (698)..(700): n is a, c, g, or t
  misc_feature (702)..(713): n is a, c, g, or t
  misc_feature (720)..(722): n is a, c, g, or t
  misc_feature (731)..(738): n is a, c, g, or t
  misc_feature (740)..(740): n is a, c, g, or t
  misc_feature (742)..(751): n is a, c, g, or t
  misc_feature (754)..(759): n is a, c, g, or t
  misc_feature (762)..(776): n is a, c, g, or t
  misc_feature (779)..(795): n is a, c, g, or t
ttattcacagctttcatctgtatttgctgtgttgttattggaaacttggatttgattacccccactatcacaatgtttttccttctgtgctatgctggcgtgaacctgtcatgctttctgcttgacctccttgatgctcctagttggcgccctagatggaaatttcaccattggagcctttcacttgttggggcattactctgtgttggtatggttcttaatactcttaccattttattttgtctatcatgatcttcagcatgaacagtttaaacttgagttaggtctttggtttgagactttgttcacttctattgtttttaatccaaccaccttatcttcacctacaatactcaattattatttatcatgttttacaatagcaaatatctaactgaaacagccatgaaagcatttataattataagtgttgacatgaatctttgtatcaatttcagtgattatgtttctgatctcctggtctttcactgttgtctcccttgcccttgcaagcctcatctattactatgtgagcataaaagggaaggctggagactggggagatgggttcaagagtgcatactttcaattggcactccgaagtctcagatcactcggaggtgcgactgactatctgcnntgcgaataaaanaaannnnnnnnnnnnnnnnnnnnnnnnnnnnnnnannnnnnncccnnncnnnnnnnnnnnnccccccnnncccccctcnnnnnnnntntnnnnnnnnnncannnnnncannnnnnnnnnnnnnnacnnnnnnnnnnnnnnnnnctc

SEQ ID NO: 6129 - DNA, 603 bp, Zea mays
tacattacacagggcaaaaaaaagtttcaccaacgtacagtttacagggtactccatctaaatattggccacgctaactactccctccgtttctttttagttgtcactggatagttcaattttacactatccagcgacaactaaaacaaaacggagggagtagttatcagtcgaaatgttgtcgaagagccatctcggtttcgctcttccaggacgcatgcgacgattggcccctcatcctcttgatcttctccttgtctttgacagtggaacccttcttcttttcgggctcttttgtcagcgccggtctatcaccacattgagggcaaaccatacccttgccatgtgagtaggtctttggtacaccacattggagacacatcctaaacaatgagccgaagtcacaattaagaacactaatagtattaaggaattctggtatatattagagttcacgtaaaacatgtacacaagctatttcaaaatatttgtttcgttgtgacatggatacaaaaatgaccaataatacctcagaagatcagctgcatcttctggaccaggatttgcggcacctattattctttttccatcaacagaaccaga

SEQ ID NO: 6130 - DNA, 1259 bp, Zea mays
  misc_feature (1247)..(1247): n is a, c, g, or t
  misc_feature (1249)..(1251): n is a, c, g, or t
  misc_feature (1254)..(1256): n is a, c, g, or t
caaggggttggtctcttctttttcatatttgatttgtgtgctgcatctgtagccaaggcctgggctccatgtgttccagccctgtctcttggtctacaagtccatggaaggccacttaactatatgtagaaacatcatggtcataagggattttaggcatatttgaacaggctcggcctgggtctcaggtcatttctggcatcatccctgtgcattaaccatgattatcttgtattccagtgaattatttttgaatcagagaaaaagaaccatcaaccttatgaattttgtttctgtgctacaggtacatttgctcatgtggcgaagagtcaaaatctgttgtctccttatttaatgattatttgaagggctgggtatgttccatacagggctggcataacattcattttgtacatatattgggtaaatctctattatacctatgcatatttacagaacaagattcaaccagggttgccaaaaccacgcttgtttactgtgggtcgtcttgatgttgccacggctggtctgataatagtcacaaatgatggtaagttgatcatatgtagtaatatgtactctctcagttatagattgtaagtcattttggcttttctagatacgtaactttttactcagatatacattatgtctagaacacagtaaaaggctaaaaattatgcaactagaaaagccagagcgacttacaatttcgaacagagggagtactttggaaaaagaacagtttttgtcatccaagacctaagcttgattttctcctctcttttaggtgagtttgctcaaaagcttgcacatccttcttcaaatgtaacaaaagagtaagtttaacgtcttttgcgtgtttatatgccatttgaatactgtgatgtaatgcaaaagtaacgtgtactggaactactgcgaatgctattcattatgcaaaatccggtagcacaaattagtaaataaagtcttctaccatataatatgagaactatgaaagaagaccattagaataggtgtataggatcaatattacaactcttctctgtggatggatttacaattatagatcagtttttaaatggttgctgggcaatgaataggaaaagtgaacataaatttgatctgacaggtttgtgttttttcaatgctgcagatatgtggtgactattgatggtgccgtgcacaaaaaacatctcatagctatcagtgaaggcacaaaaattgatggggtcatgtgcatncnnngannnagt

SEQ ID NO: 6131 - DNA, 355 bp, Zea mays
ttttcagtggagatgacttccacagctttgatatggcggactctttcttcttggactgttccatgtccgtcaggtacacactgctcaagtcatcacacagtttgttggcctgctcaccctcagaatcatttccactggtccacgaaattctgtcaaagatcttgttgactgaatgttcactttcatacggcgaatggcttgagccttgcatctcttcatggctcatggtctcccagctgcttccatcttccttatcgctctcatcagaatggcttccatctgggaacaatctggctcgattttccagaaatatatcagctgttgggctagcttcttggatttcttgctttaggca

SEQ ID NO: 6132 - DNA, 408 bp, Zea mays
gctgcccgtcttgggagtcggagctcgtcacttgtgttgagctcggcaacgatgactcaggatgggtactgtgtgtgtgggttgctgttgtctgggttgtttgtgcgccctgtattggttttgggcccggtttcccttaaaactgggtcaattcttttcttcttaattgagaggcagagttcctgccattacgttcaaaaataataatagagtgttggttttgtggtgcaccatgtggggtagtacttcaataagctacacactaggttcaaacttgaaaaagaaggctttgagaatttggattaagagcatggagtgttaaatggatatgttttctatatgataggatctggtatctccagggatcgattctccttccaaacctaagaattgtcctgagacctggga

SEQ ID NO: 6133 - DNA, 444 bp, Zea mays
aatgaatacaaggataggcatgtagagatggcagaatccatggagcctgatcaacttactgaagcaatacatgccgaaagtcagcacaacttgggagatgctagggaggctttaccagcggaggagggtacaagcgatatgagtactagcgaagcagagagtcacaacaacattggtgcagcatccgataaggtctccgatagcagtgccaagaatactgcgcaggcagtggtgttggaggtttctagtgaaagagaagaggaaagtgaacagcagtgaagaccagtggattgactgctgaaaggaatcaatagaattccaccatatatgaatttgagacaaaaatgctccctggtttgaagtttgaaggagctatagcaagcattgatggagcgctattgctgagtttcacgggcttgccactgtgcatatacttcacaaaaa

SEQ ID NO: 6134 - DNA, 416 bp, Zea mays
cgtgcttctgctgcggtgtggtgtgcggatgctagctagccgactagccgagcacgagcagtagtgctggttgcggcgtaacttcgcttctatggttcggtagtgggtggtgctgatgtggtgcctgcttgcgtgagcgctgcctgcaggtccgcaaatgcaggctgctggcctgcagcactgcacagggcgtgcgtgagcacggagcagagggggagcaagggggaagggaaagccaaggtcaaggtgcgagcgacgggagttaccggcatgcccatggcgacaccgtctcggtcgcgcagtggagcaagggtggtttggggatttggggaggcgtaggcgttgcagttgcagcgtgatgaagtggggccgcggagaagacagcgggcgcagcttgatttggattttgagtgttg

SEQ ID NO: 6135 - DNA, 361 bp, Zea mays
tgtttctagtgctgttactcatgaccccccatcatcggagcaagatgagctgttccatcgtggccaagagaaggtcttatttgtggatgatgcttcaactgcagtgcctaatgaaaatcacgaggctggaaacgaggatgaagtgcgcagggctagggaaaggagcttcagaggtgatgatgtgtcaagctctgtagatcatgacggcaaggtgacaaaacctctcccagaggaacaattgaacatcatggataggatatttgaaggcaccacaaacttatctaatggaatttcatttcgagctcctggaataaatggatcatataccaccgcaggcaatgtggctacaccaacgaattct

SEQ ID NO: 6136 - DNA, 997 bp, Zea mays
gattttccgtggctatgtcacctgcaaaagcgaaaccattctatgcttctctagttgagaaatttcaaaggtcatactcggctgattcagtgaaaggtaacaaatatgtattttataattaattcgttgcgctttacacagtttgccaacctgaattcttgaataccaaatcaatgttctctttccttttgttaacatggatatgcctatattttggattttcctgttattattgatacattcattgtaacgttcccacgccgcccatggtcctgtgttgaacattcttttctgctggatgtacatttcatcttctcaatagtcacttcctgttatgatatgccgataacatagctatttctttagtgatgttttccagatgttctgctcacttgtttacttcgctgaactattggcctattgccatagtatgtctatgctccccatactcataatacatgatcttcttgcacttgttatttctctgctgctactattgcttttgctgttttgcactatgttccatctacatctaaagatttctgccatgagtcactgtatcacatgaaaatatatgtgatgatgttcctactttgactggcagatggtgtttttggagcgatgatgaaggtgcctctgactgaaacatgttatttgtcctcatagcgtttgattgaccttctcagaaaaaaaggtgtaaattggaaagccttgcaggtttctttggtgaatgatggccccgtgacaatgcaaatcgactcaccctcactgcaaggtgctgctcagtcaaggtgagttcgttcaaattaccaggtttattttaatctttattgaaccatacacttgctagctagaatagcatgcaaggttatacagacttgtctgaactattcatttttatgcatttgaacagcaatggttatgatgatttggttgcggatggtgaagcaagagtagctaaagagacgtgttaaaattctgggtctcttgctgacct

SEQ ID NO: 6137 - DNA, 596 bp, Zea mays
gattcccgtgctcaaggacatcttgaaagtggtaaggattgttatatagatactctttcatgttgttattgtagccggtaaaaattatctgctagactggcactatgcttaggtatcctctagtttgtgcctctagtttgtgcctgacaactcctctactacagtaggaacaccattgcaagatatcagaatgcatcatttcttgtgatctgctgattcattaatgttcattaggtccatgaagcccttcccgggagctattttaacagcttgctcctgaacagatacaagacaggttcagactacgtttcatggcatgcagacgatgagcccctctacgggccgactccagagatagcatctgttacctttgggtgtgaacgtgacttcttacttcggaagaagcctaccaaatcgcaaggtgcggtcgtagtgttttgttatcgtagcacatcatttagccggaattgattcgctgtaaacatctgccagccacttctggatctggagaagctggtcgaaagcggctcaaggtcgatgcacctcagaagccacatcattttcttctgaagcatggctcgctgcttgtgatgaga

SEQ ID NO: 6138 - DNA, 475 bp, Zea mays
gcagaagaggatgaaaggtactaagcaattactgtctgccattatcgttggtgttatattttctctggcattcacgtaacacttaaggtccatggtgcgcatgtagatttgtcaaagagtggaagaagtatcttgaggaggaggcgaggatcatgaaagatgttccagggtggaaggtcggcgagagcgtgtacaactccgggaaatggatgcccccggctactggtgagctccgccctgaggtttggtaagggcctgttgcaggcactgaatgccatcatgtcacgggggcacggataaggcttcatttttcattaaggatcagctgtttaaagacctgtatttgttgtacttgaaatctggctggttaataattggacatgtaaagacgacgtttacattgatgtaacgtgttcttgtctgctattgcttcccagcctctggtgtttcttcctgtaagtcattccgaacatga

SEQ ID NO: 6139 - DNA, 480 bp, Zea mays
tgcctttctcccaacccgccaaaccctacttgccaccgccaaacttccgccttcgtccgcgccggcgccgctctatcgctctaaaataacctttccagttccaccgggactagctgaaaggagagggaacggagggggatggcgtcgccggacgacgagataagccggctcttccgcatccgccgcacggtgtatgagatgctgcgcgaccgcggatacggtgtccgcgacgaacaaatcaagctcgaaaggcacaagttcatcgaacgctacggcaaccccgtccgccgtgacgagctcaccttcaacgccacaaagttgaacggcccatcggaccaggtctcatcctgatcccctgctccctcttacgccgccgccgccgcctcggcgtaaccctagccgtgcgttacccctgcagatctacgtgttctttcctaatgaggcaaagcccggggtgaagacaatcaggaactacgtagt

SEQ ID NO: 6140 - DNA, 846 bp, Zea mays
  misc_feature (791)..(791): n is a, c, g, or t
cgagcagttcgctcttcgcggattgggtgaggcgttgcagcatgaggtcatcgcggacaacattcatgtctcgttgatattccctcctgacactgagactccaggattggaagagggtatgtgttgcttatgaactggccaagtatattttagttcatgtctgctttggtagcaactaaacaagtgaaccatgaatgtttgagttatctatcctcttcgatttgacagccaagcttttcaacttggcaaaactgaaaatatcagagctatcttctatactcacttcagcaactgatctcagcaatcagtaacccttacaacttgcctgtaaatcagtacgccgtacattaaaatccatacaccaaaaacatgctgctactgaatatttcacattcccatttgttccattcagtgcatggctcatatagcatgctctcatttgtttcattagtacatgtttcacagtaccattttctcaagcacaccagcaaacattggggggggaagagtaggaaaaaaagaatgcccctaagcttggcatcctaatttctgaagacacggtctacaaatttttgctaccgaatgctgagcatgtggtttgcctaatttcagagcataagaggaggccggaattgacaaacatcatagcaggatcatccggtggaatgaaggccgacgatgttgccaagaaggctctggacggcatcaaatccgcaaaattcattgtcccctgtaatttcgagggcgcaatgttagccgtagccaccgctggtttatccccgcagagctcnccgttaatggcattcctagaagtggttggcgctggactcatgcggttgcggcaat

SEQ ID NO: 6141 - DNA, 371 bp, Zea mays
cgtggttcttatgtgattttgttacctcaatacggaggaatgcagtatgattttgcaggttgttttatctggtattttgggattcatgccttacacctattgttggatgaattttgctgcagatgtcacagcctcaatacaatcagctatttgtcaagaagcctgatctagataacccctggccttagggagtacagaactacatatgtgtataagttgtagcctactagcctggtcttttctttgagttgtgttgcaagtactctttgaagccctgttatcaggagcatgttttatgattagttagaggattctcttcggtgacgatgaatatatttagctagtcattttaatattggtatgtgtgatac

SEQ ID NO: 6142 - DNA, 356 bp, Zea mays
tgtgcacgtctctgtgtccgtccgtcgccggatctggtcgtagtggagacgtagtcgtagtgtctgatcaggcagcaacagcagcgacgcgtcgatagatactagttgacgatagggttgttgtggcaggggcagctgcgtgttggacgacaacgcggtgcccatgccgttggcaagcgtcgcggccgtggcggcaccgcccaaggcgttggcggccaccacagacacggttggccttgtaggaaaacactaataaattcttgtttattagtgttgtcttatctcttggtttaataccatccaaagaagtactgtcctgtcaggaaaacactaataattcttgtttggacgaatct

SEQ ID NO: 6143 - DNA, 933 bp, Zea mays
tctgttcctgagacagtcaagaaggcaaatgattatcctgttggacctattcttcttgggttctttgtctttgttgttgttggatcatgtaagtccttatgtttctgatgttttgtggttgatggtcttcctggacactctttcgcttttaacagttgagtgcatctgctgtctgccatcctaccaaatcagctcggaaccatctgttccgatattttaatcatcatcaatcctaagttcctaacacagtttcttgtcagttgttatttgtattacagtaacatgcttattattctgaagggtaatgctttatgtgccttggccatgctaaattgtggtacatgactaatgagcagcaagcagttctttgaaaagtaaccagcatttctgtgctttgaattttgaatttggaagtttggacttgttgaacctaaaatgttctcttggtttactctagatgtattggctaacaaccataggcattaactgtaccactctgataacgactcacagtggaatagagaagtacaaaaattgcagggcaagggttttataccgtagttatatacttgctcaatctaatatgaatatgatgcttccagagaattgtgagttttatgtagcctgatcattttttacccttgtgttagaagcatgcttatgagctatttgaatttgcggtctgagttatttactctctccttcatgcagctctctttcagatcatcaagacagcatcaaacgctggtttattctgaggacaattggtcacttacttttagtcactctaaagtcgaggaacagggttgacatatgcagtttgtcacttaaaaactatacaagtgtatggcgtagctggtactctacaatgtcgcctttgtaatgctgtaccatggagagttttaagttataatgtatagtccatatatatgc

SEQ ID NO: 6144 - DNA, 390 bp, Zea mays
gattgctagaccaatgacagcgttgctagcgaagaaagttgagtttaagtggacccaaaagtgtcaagaagcatttgaagaactgaagaataaattgactacagctcctgtgttagttctgcctgatgttcacaagccattctcagtgtattgcgatgcttcttacaccggattgggatgtgtgttaatgcaagaaggaagagttgtagcatactcgtctcgacagctgaagattcatgagaaaaattatcccactcatgacctggagttggcagcagtggttcatgctttaaagacctggagacattatctgtatgggcagaagtgcgatatctacacagatcacaaaagtctgaagtacatattcacccagtcagagctaaacatgag

SEQ ID NO: 6145 - DNA, 535 bp, Zea mays
tttaatgaaggagttgcagttctgctagttgacatagtggtggaagctgctctactttacagcaatcgaacaaccgaagctcgagtatgtttttcaacatacccatccaagatggaaaacgggtgccttggtaggaatatatttctagagccaacagtccatcatgagcttcaaggctctctagcacctcatgacactgttgttcctcctccttaccacttgtccactctagtgacagttgtctcagttccttcttattctcaagtttggctgcttctgcatttcttctccctgtcacattttcgagctgctttagcattaatgagccaccaatatttaaatcccttagctctccaaggctactacaactcaagccacttcccactacaaaccatgtaattgttcgaagcgaggtgatttgtccaagatctggaggcatgcactccaaccttgtgcacccatctgtgtagagatgacgaagggcactcatgtgcttcatttgctcaggaagtctaataagattcctgcatccaga

SEQ ID NO: 6146 - DNA, 410 bp, Zea mays
gcatccgcgaccggatggcgcgcgccgcgtccagctatgtatccaggagggggctctccgcagcgatgacggtggctgcggagtccgtgaagaaggtggaggagaaggcggtgaagctgggaacggtggccaaggacatcgccagcgccatggccaccacgacggaggagaagacggcgttctgggaacctgaccccgagaccggatactaccgtccggtcaccggcacgaaggaggtggacgccgccgacctgcgcgccgagatgctcaagcggaggattctgcaggacgactgacgcatgcagcatgcactagctgcccctgttcgatcgccaagatcacacgacgacgaagatactgtacctagtagtacgtacgtacgtgtacacctgattatccgaagaagatgg

SEQ ID NO: 6147 - DNA, 327 bp, Zea mays
  misc_feature (205)..(205): n is a, c, g, or t
  misc_feature (280)..(280): n is a, c, g, or t
  misc_feature (306)..(307): n is a, c, g, or t
ctgctgggaaatatctgccatttatatacagatcataaaagtttgaagtatatttttacccagtcagaactgaacatgaggcagagaagatggcttgagctgattaaagattatgatttggaaatccactatcacccaggaaaagccaatgtggtggcagatgcactgagtcgcaaggcttcctgccattgtcttacagtaaggncctctgacaccacattatgtcaagaaatggagaagttaaacctgggaatgatacaacatggaactttgacccaantaaagcttgagtcagttcttctacannaagattattgatgcccaaag

SEQ ID NO: 6148 - DNA, 469 bp, Zea mays
gcatggaggaagagcagagcccaaggctgggccgggatccggcgaccgagcccagtcctgcgccggaatggccggattcggacagcaagaacgacgacagtgcaaacgacccggaggaccctgccggcggcaacggcagcggcagcggcaacggcatcagctccttggagcagccgctgctcaagcggagcaccaccctgacggccagccacctggccatcgtcggcgccaaggtctcccacatcgagagcctcgactacgagtgagcattccatcttagcttgttactactactacctccatgcttgtcatcgtggctgatgatgaagtgcggctggctctgctcttgcgtcccaaaattgaattgctctgtctgtctgttctgttcttggcacgcaggatcatcgagaacgacctgttcaagcacgactggcggagccgctccaacgtcgaggtgcttcagtacatc

SEQ ID NO: 6149 - DNA, 405 bp, Zea mays
catgttcccggaccttccatggatgttggtgaaggaaaaggtagcaccgtctcaagagcacaatgaaggggctaggaagaaaggcaaaaggccaaacaggaaaggtggcctctgcgatgccgttgcatttgctgttggtgttggtatcgttggtgctggattgcttcttggatggactcttgggtggctactgccctagctggaagttccatcgacttccatgaccgtaaaggtgacaggataaatgcctcctgtgcacactagattgaatggcaatacattgcatggcaataggtaagttccaagtgtgtgcttcatggagagagagatggggcagctttttggtattcttccatgatactctgttgatttggtgatgatagcttgatgccttatgttggttca

SEQ ID NO: 6150 - DNA, 474 bp, Zea mays
cgacgtctgtttgccctgcgcctgcctgcagaacgaggtgtcggtgctgtcccctcgcgtggcgtttctggaccagcagcggaccatactgagcgtcggcaacagccacctcaagcagcggatcgcagctcttgcccaggacaagattttcaaggacggtaagtactgtacgtagtagtgcgtctcatctcatgcttcgtaatttctccgtcagctaatggtccgtatactacctaccatatgtgtatttcgttcttcagctcatcaagaggagctgaagaaggagatcgagaggctgcgccgggtctacgaccagcagaacctcaggatgtcagccggcggcggcgccgcttctgaccatgggccgccaccaccggtggtgcgcgctgagaaggagctcatgagctagcgaaccagtccatccgtgcccgatgtgcagtccgacttatcattaacatggagggaacattgcat

SEQ ID NO: 6151 - DNA, 901 bp, Zea mays
  misc_feature (883)..(895): n is a, c, g, or t
aggtgcataaatgaggctgctccagataaactaaaacctctgcatgtgtcagaggtatattttcatttttggccgaatacaccaatgcatttaatatcgttgctgctagtgatgcattctattgtgtcatttaatcatacaacagtattagagcagtttatttttgttggtgaaagttctgaggatgccaggacctcaaccgcaaataatgccatgctcggcttatgacacaatttgcaggtttcgcgtgagtttcatcctaattttgcagcgaaatggaggaggtacatgtatattttccctcttgatgaggatgctgacttgattttaggggaagcacagtcctcaaaaacactagagaattctgaacacaacataaagcctcaaagctttgatgtgtccaaggttgatgaaattctcaaaccacttgctggaaagacattatcctacaagatgtttgcacgtgatacacaggcttcacgaagtgtgtaagtttcatccaattccaatcacatgttcataacatgtgcatacaaaaatgggttcttacagattaatcttagaggctttatttcctgatcctgacgtagatgttcatcaggatcgtctcaaaattgttaaaaaaaatcacaggtgagagttatgtatctttatattaagaagaaaagggacaataacccttaaaacacacactgacacccatgtttctgagattagtagattacatatccttttttcgtgggaatccatgtctctatgttggcagtgacacttgttttggaggttactgaagtcaccatttctctcgatgttctacccttttttcagtggcccacctacagaatgtttcatgttccattcccgagctgcagtggccaaactnnnnnnnnnnnnnaaaaaa

SEQ ID NO: 6152 - DNA, 869 bp, Zea mays
gtgctgcattttctggtgacctcagtgtgaggaccgtcaccatagacataacctgcgcattcaattgagctcagaacggtatctcaatacagaaattcttcagtattcctatttcaacagtacctcttgaattatagcaggatcttcagaaaatctggatgtcaactttaggaacctatcaaaaccacctcgctgaatgataatggacttgtttgcatcgcttgcagcaagcttaaaggaaaaaaatgatgtttggtttattgaaagttgaatgttctcgtttcacaagcagaaaaggttgcagtgttgtaccatactaccataccttggacaacaaagagcagcaagatcttgctacagctttgttcttctgctcaccagccccgtcgatgcattgaagaagcacatcaattccaccattttcagatatggaacggcatatttcatcctgtggcaacacacaacagaacatggtaaagctctcctatgccatctcataatcaaaatggtaagcatgccagacagtttattataaagagtgtaacatttttcaagcgccagatttttctggatattggcctcatgaaaattaaattttaactggccagtgactgctagctacatatgaaagactaaaccagtaaggacctattagaggaggggttatcgaatcaaatccatagaatttacaatttagttcaaatcccaaacttgccagagtggataccctcctgataagctgtttcttccaactaaactgaagcttgaacaacttaaaaattgataacattgcaaagcttacattgactgcaatcgactttaaagcagcacaagcagatggcaaactggaaggagcgacttgctcacga

SEQ ID NO: 6153 - DNA, 922 bp, Zea mays
  misc_feature (914)..(914): n is a, c, g, or t
gtttgctggaatggtgcgtgtgttgaaggtgcctacagttcttcttgtcacttctggtggacagcagcaaggcaagagctctacagtttctgatcttgaggtatgttttgactattgtattgaagttaggtgaaaacattatttgcctttattcaagtctcaaggctcttgtcatggaaataataattgtctatttctgctttcctttgcttctgtttgctctgcagactttgtggtcctgaaattttatagaattgttctgatcaaatgggaaacatcagaacaaaataggcgtgctaggtggtggcaatgttaaaatgtgtctctaaaagatctacggtgacagtggataacattgttttctagttttcttctgttaaaaaaaagcaacacaccttgcttttcctatggtcttgcctgattcttggtgttttgatctgtctatttagtactgcgatgttaaaagttttgacttctgaatttatcatattctaatatgaagtagtgcatataaccacacataggtagcattaacagcctgctgcctctgatcggtccagttcagttctgaagaactgtgaaaaaaggatattataatttatacatgtaaaatgtgaagtttcttgagtcttagctcacccaattttttccccaattgttaggtactgcaatgcttaggagagcacttggccaagcacacggctttggaattttccaaaggaactgttctcaagagagggatcgaaaaatcaccaattgatcaggaaccctggcgcgagctgtatgggtgacggtgccctcatacagtttggtattagcttaattggctatacatgtttgactcggatgaatgatggtgttttatggagctggaatcacgaaggatctggtccgtcgaaaccactatatataangtgtcctt

SEQ ID NO: 6154 - DNA, 673 bp, Zea mays
ctggccgtgctcaaggctgcgtaccctaaactagtgagcacctttttctatcatttttatattcgttctgaagacctttgacctggatgcttacatgctcagttctgttctgtatcaggtaaggaaggagaagattttatctcccgatgaactgcggccgttccagaaccattcgacccagatggcagcgctggattacatggtctctctagcaagcgacattttcattcccagctacgacggaaatatggcaagggttgtcgaaggccaccgcaggtctgcatctttggattccgatcggagcttttcccgtctatttatcgtactgtgcattaatcgtcactactagtcggtagaagtatagctttatgctagttttgaattatccgcgggaagaaaactctctgcctaaacaagttctgcgatggctgtaaacgtcattgctgatctattctcaggtatatggatttccgcaagaccatcgtcttggacagaaagaagctcgtcgagctgttggaccttttccaagggggcgctctatcctgggacgaattctcggacgcagtgaaggaggcacacaggagccgcacgggccagcctgcggaaagaaaggtcgtcccagggcagcccaaggaagaggactacttctacgctaatcctctagaatgcctcg

SEQ ID NO: 6155 - DNA, 725 bp, Zea mays
  misc_feature (670)..(670): n is a, c, g, or t
tctctttgttcggcttattatcctctttatctggtgcatccttttgtcggcctctcattgatcgagctccactattactgtcgttattgactgtctggcgggcatttcctttgacttttgagctattaccgctaaacttagcatattccttgacaaatacaacttgtcagcatgatagaatgcaaaaaaaatagagtgcaaggtaacacctaaacgccactgtacttgatccatcctatggggcattcagggttgcaatttgataacagttcaaaacctgaacttatcaaatgatcaggacatggtagaaggcttcaactattagtagtccgtaaattagataatcacatacaaaaaaacaagaaaagaacattgtccaaaagtaaacaaattcatgcgcatttaaaaataaaccgcacatgaacctctggttcggaagaggtaccttttgcaggagagcgctagcacggttatccaagtttggagcacgtggtaaaaatgtctctctctcaccaagtgttgctggtgcaatttttgttgtcaggccaagctttggatccaaacgtattttctcccaattcccgtagccataccaatgaattccaaccatcaatctagcatcatcagctacaaccatacaagaaaaaacgataagattcccatgttttanagaatgtctaagcaattagggttgaaatgcaattactttcagtccatccacagct

SEQ ID NO: 6156 - DNA, 680 bp, Zea mays
  misc_feature (672)..(674): n is a, c, g, or t
gttgttatctttcactagtattgctgttttcccttattttctatcatgaatgtcttttttttctctcaggaagttgccttctagaattacagctatccaatatattttgtatgcagtcatatacagcttgctgcgaaggcgttgcccatcacaggaacaaaagctgaccttccaaaaaaatctagaaaagaggatcttgagagtgttgtcggcatggcttcatcagcaacagcaagtggtgggaagtttgatgagaagttgcctggcgagaaacctccaaagcaccctggcaaacacagaaaggtttttatatctgaatggttttgatttctgaatctgtaccttttaggctgattttgttcactagctgattgatgccgtttctgcagttcctcccagttgccgaagggaagggaatgggcagcctggagaaacagcagaatgacaaaatcctgaactctctacttgccagaaactctgatgaaccacttgatgtcggcaaggcaagttccaggatccaacgcttacatgaagttgtgttttaccctccattgatggtaaccctccttgttttgttcgggtgagctgatgacatcatctgttctaagcaggcaattacaatgtacaaggtgaaaaaggagaagcagagaaggaaagagaaaggcatgtcannngaaatc

SEQ ID NO: 6157 - DNA, 413 bp, Zea mays
gcaggaagaggcggtcgagatcgagaactccggtcaaaaggagatagaaggcatcgacagtttatccgacgagatctttgcctaaacattcctctgaaacaaccaaagacatttttgcggtactgctgttgtctatctagtgcgtcttttgctccgacaacataatggtagaacagcatgcctacagtgacaaacatgaaggcgaggactggatgtaccttgatataagatgcacattgaactgtatcttgtttgatagatgagctatataactagctcacgcagctgactgtatgatctgtagttcccccgttatctgaattgttcatgtattaggccatgtactgctcagcagacctatgtagttagttgcacttgtatgacttcagcatttctgttgccagttgtttgtt

SEQ ID NO: 6158 - DNA, 670 bp, Zea mays
tgagaaggaggtccgtgcctagataaccggctgcagtaatggtggcgtctgcaactacacgggccaacgtcccggcctctgttgaaaggagtccaccattgtaggtccctcgggaaagccttgacgacatcactcgtgaaagcaaggacagattcactcctgtatggtttggtattaggtgcgtgactgataaaatcagtagcgtgtgcttaatttaggttttgctgcacgtaatgctttgaaatggtcgcatgcactcatcgcatattaattataaacatacataccttcaagcacctcagaaaatacaaatgtgatgagagctgaaatgacatattgcggaatggagtagtgaggtgtgaaacgaaagctcatgattataccaatgagaaccatgacttcagatgccaacaaaatttgcctgcaaaagagaagggaaacattagcagctgttcattatgctttagagtaagttttaattccctaaaacaactggtgatatatctgcagagcatgtctcagtttaagagaaaagcagtgtccagagaatataaaagtttcctatagtatgtttcataggagtacaaaacttacctatcctcaaacaagttcgtaatgtagcttccaacgattgcatttactggaagaaccgttaatccaagaatcgcta

SEQ ID NO: 6159 - DNA, 700 bp, Zea mays
tgtatattactctgtttaaaaaaatgaagtttgaaataggtggtgtggtggtaggtgggataggaagtctgctagagatagcctttatgaaaatgttggtgtgcattatggacttttaaaaattgttttgaagtctaagctatgagagaaagttaaaaatgtgtttaattaaacatttgatttttgataaacctgttgtaagtctctcttacgagcggaatccacatctcatccatagtcctcccaacttggggcaggattgagtgctgcagcagggcccattggcagagcctttgaggcagacgttcggaccagtgaaaagggatctgggatatgctacacttacagctgcagcaaaggtagaaatttgaacattggctcttaacatcgctcctaggttcttttaggatagaaataagtaagtgctaatttgatcgtaaaaggtcacggcagtgttcttttaatagtgtcacttaggttcctatttatcgtctggcaataattaaagaagatatgtgcattttactcaccaaacagtctgaattgccaattcatactactcacattgagatatcacaagatctttgtagcttgcgcttggtacaagatatcctcaccacttgatgtcatgaaaacttgtaaacaggtgccttcgttggtgtttcactggaagggaatgtggtgacaactagaatggaaa

SEQ ID NO: 6160 - DNA, 482 bp, Zea mays
atggtttgcacagaaccatcagtcgcacattgtccatctctcaggtagatgcaatcctactgaaattagaaagcaagtaaatacataagtttttttttcacaatttaccactgttttcagacagggaaggccatagatatactcgtaccttatcttcctccgaagccaaatcagtcgcacgtttacatttttttgcatcacaaacatctcccgattcaattcattcttgaacacctctgctgcaagggccttctcctcatccgtcaactcctccatagcatcaactgtgtcgagacacctctcgatagagtactcctcttcacgactcttcttctcaagtaacacctccataatcttctgtgtttgcttcttcttgtgctccaaatagtcatccagaacacttgcaacttgacttttcttctgctttttccctcttctatatactgacgtaacagaaggtggagactgaacttcacaagcct

SEQ ID NO: 6161 - DNA, 358 bp, Zea mays
ctttcagcctgtggatgggcagcactgttttcttggctaaggttaaccaatgcagtcagaccatctgctgaaatatctccattgcggtcaattctaggttctgattcatcattggcaaattgctgggcatttcttgaaccgagcccgtaagggacacgtgagaagacgtaacgtgtaggagcccaggctgcaccaggcacatttgagttccctctcccaataccggcaaggccatcaactgctcctcttacgttaacacggacaggcccaagtacaccattcccatcgccctgggcatccgcaaggtagacattacctatggtgccggaaacactgctccggtcatgttcctgcctgt

SEQ ID NO: 6162 - DNA, 391 bp, Zea mays
tacaaaataacacggaaagggtccagcaactggtcgtcggtcgagtcaaaattcattttggatgacatcatcaagcatggaggccggctatacacgtgcgacatgtatggcacagtggagatgtgggcagagccgccccgcgcgtggccagatgaggaagtcacgcatcggtggaggttccgctgtcttatagagaccccagctggtgatctggtcagggttaagcgcctgtgccagaacaagtttgctgtttggatattggacaaggcgagctcttcctgggttgggaccgagaacattggggatctcgcgctgtttgtgagccactacaactcattctgtttccctgccagtggccagcccaacctgaaagcgaactgcatctacttca

SEQ ID NO: 6163 - DNA, 390 bp, Zea mays
gatcaaagtttcatatattgttttcattgatttagagttttaaattatgtttccctcttatataggtacatggtttaccagggttcccgatatcgatcaccgtcggagccccgccagagacagtatcaacaccaatgaaaataaattattattatttaaatgctatagttaaatattttttgtatggttatcaacatttattatttctgataacacgccatcgagccaattctgaataggcagtcatttttgtttgttacttactccctccgttccaaattataagttcttttgactttttggtacatcaatttactatgtatctaaatataatgtatgtctagatacatagcaaaatctatgtaaaaaaagtgaaagcgacttattatt

SEQ ID NO: 6164 - DNA, 1089 bp, Zea mays
  misc_feature (31)..(33): n is a, c, g, or t
agggcttcctgttaccactgttcagggttcnnngacacccaacagcataaattcctctaaaactgatggtacaaaaaatgaatacatgtcactccttgtactagttatatgtggccctaatattagtagtaatcagggtgaacatatgttggagcctgctgagggggcattaagtgctcaaggctcatttgatgaaggtgtcaccactgaacctccctagtgctgtgctgtcacatgaatagtaccgcatgttagtgttggctctaggacagggtgggttcactagatgaaaccagatcgagtgttatcactctccataattctagagaatccccacacttgtggtgcagctgccattcgccggcatggttgcgcttgcgctgcttgtgttgtggaccatctgaagtatggccatgacaatggggcatcatctgctctttttctggtatggatcaccacgcatatggcgagggatctagctactgctacctaagtttggaatatgtcgatttcctacttaagatttgccttgtaccttggctgctcattcatggatttgtcttgtacttacgttaggaggaatatgtcgattgttggtgaaacgatttcaggcttatgggcttgtcccttttatctttcaggtattcctagagaaagcttcagggtcattgtgaatgcccaggaacttggttttgaatccaccgaaactcccagaactgatagatcagtaagccttctctcctgtggctcttggtagtattcattagaagggcagacttgttagtattcaattttgaataagaatgggattttagccccttcagtcagcctccggttttatggctctcaaatattgattatgtatgaccgcatgtgggatatacgtacacttactttgtttccaactctgaatcagattctaaagaacttggagttcggcctggcagcactaggtggcgagaaaggagcagcctacgaccggatagttctcaacgcagcaatggctgaccacttgctaggctgcagcggagccgaggacatcgacgctgcgctcgaccgtgcgagggaagccattgatagcggcgaagc

SEQ ID NO: 6165 - DNA, 750 bp, Zea mays
cttcgtcgaaagcgcgtccatggcggttatagcgtcgacgctggactctctgttggacctgctgtcagggttcatactttggttcactgcgtacaagatgaaaaagccgaacaagtacaactatccaattgggaagaggcgcatgcagccagtggtaaggacattgttcgtcaaacgtagttactttggttgatttttatcatataaattaaagatgataccagtttgcattactcggctctcatttctgaatttctatgttcttgtctattcctctgaatcagttacttcagaagttaagcttaaaaaatcagttgcttcagaagcgtagctacaatgagttacacactggcatacttctgagttccacagtatctagatcattcagagtgtccacctttgttgccggcaagctgagtaatttgacatttatcgcagggaataatagttttcgcatcagtgatgggcacacttggcttccaagtgctcatcgaatcagggcgccagctcataactcaggtacatgatctgtgcttcacaattatcctaacgttaaatgttctttctgacttggatgccgatgagatgacccaatcaggagcacgcggatttcaagttcaagcaagagctgtggatggtcattagcatgtcctctgttgcggtcgtgaagttcttcctcatgctctactgccgaacgttcaagaatgagatcgtgagggcctacgcccaggaccatttcttcgatgtaat

SEQ ID NO: 6166 - DNA, 719 bp, Zea mays
gccgccctcccgcaccacgctcgactgcactgccaccttcgaccccgccaacaaggtcagcctctcccacacgctcgggtccggcggctgccgcgtcaagtacacctacgcgcacggggtcgagcgcctcaccaccatcgagcccctcttcgacaccaacaagaacgcctgggagttcgccgtcaccaggaagttagcgggaggggacgccgtcaagggcacctacgccgccaccaccaagctgctcggcctcgagtggagcagggactccatcgccggcggttccttgaaggtttgtgtttcatcaatctgtgcctcgacctagtaggatcctgattcctgatgaattctgcggcttcagaaacgaggaattcttatccggttttctaggcaatcaaatgcatgcttctattttcctattgtggtgttgcttcccacatcacttgccgacatgaaaccgtgcaaatgaaagcatggagggtgggtataaattgaaattgggtatgcacaatcgttggatgtaaaggctgtggtcaccaaaatcatcacctaaacctgaaattatgtgaaaagcctgtttgttgtgcgggggggaagtgagtcatctagtcagaatatggttttgtcctccaaacattttaattgccctgcatacagataccatgctgcaaaatttggatgttatagccagtggattatcttcagtcgagtgcagaagt

SEQ ID NO: 6167 - DNA, 404 bp, Zea mays
cagaactgcacgcacgcctgccccaaaggcctgaacccggcaaagcagatcgacacgatcaagaagctccagttgggtgccccaagtgcctgaaaccgagcgtgtcttcccttgaaaacggtcgtggaacagacctgtgggaaaaaaaattgggatgaacttgccacttattttgttgttgttgttgttctttggtcttcgcgcggtggtttctacctgccaaagacgaataattccaggctggggcccctccagtacactccacccatgcttttgtgtcaggcggagcggaggtagagcatagggagtgaataaccgctaccttatttcatttctatgatgtatctatctaatttggtcctcccctgataatgcacgacccgtagtgttaacaggcgtatttg

SEQ ID NO: 6168 - DNA, 400 bp, Zea mays
tgcttcatggataaggaccctcctccaacgccagatcagcagtgtacatacaacgtaccccctgcacagtgactgccgaacgattgcaggcctatctcagggttgtgtgatcttgtgattggggcggattattagtgccaagctaatcactccgttgatcgtcttgtcctcctctgttttcgccgcacccgtagatcttgatgccagccagccatatatcttctacgtgatttgtggtaggctccattatcagagggctgttgatcccattccccccgcacatctttttttctcttgtctttttttctctttttggttttttgtatgtactttgatgttgccccatttgtgagggatgggtgatcaaagaggagacgccatcccttctcgttctggaata

SEQ ID NO: 6169 - DNA, 395 bp, Zea mays
ctgcaagggcccaggggcgagcacgaggaaccgggtgccttggtcccgctcgctcacctacgacgaggcgcggccgttcctcggcccgagcttcatcaacggcgagcagtggctcaggctgtagatccgatccgtcctcccggctgccgagctgagcttcgtcgacggcgagctatggtccctccgtccgagctgtgtgtaggtcatgcgacttctctggtcttcttcggtgcatatagcgtgacaagcaagcagctagtcagactgtagacatgtacgctgtaccatatactactagtaccatgtacaaacctgatacccatatgtgatatgtgtagtgagatactgagatggccatgtccatcattcatggcaagatacatagtagtttgcat

SEQ ID NO: 6170 - DNA, 1246 bp, Zea mays
agcacatgaatgccatgaggttggtgtcctacacacccaatatttttacttcaaatcttccataaaaacatcaattttaaagtagtatagctgtttttttgaatgacaatccctgctaaagtgtgaaaagttaagcttcactgtccaaacacatggcaaactgaaccaacctccatttgtgctccactcttctgattatctctaattctctaatctctatgcaaaatattatttagttttcctgtaagctaatgttcatgtgaattttattgtgaacctatcatgcttctgccaactgtgctatattgtttatgatctcttttccgaattcaggtaattgcaaatagggcatctgagatccttggacacaagcgcggtgagaagtttgtgcacccaaatgaccatgtaaataggtcacaatcttcaaatgatacatttcccactgtaagccttaactatttttattccagtattactattactgctgcagatgtttcttattcatggcattgacatttccaggtaatgcatatagcgacggccgttgagatacattcgaggtttatcccaagtttgcaacagttgcatgattcacttcattcgaaagtattaacttctcctttccttaggaactattttactatgcttgtcagttgtcaaatgccttccataattatattgtgaccgtttttgtactatgcttgttagttgttaagtgccttttgtataactatatcatgacctattaatattatattatcctactgtgaatttgtgcctattgattatatccacctgctgattagggattcagattgaagttgaaacattagaaatttagaaaatcatcaaagatcttaatatttcgacattgcttgtacaagaactacatagcgtggctcctaactatgcacaagttctgtagcagtccattagagtcgcttaattcttttcctgattgaagttcgtattaataattaggtgcttcataccaatttgtacatgctaatgctaatgtgtaggatttgctaacctgactgtgcagactgttgagtttaaagacataattaaaattggacgtacacatacccaagatgccaccccattgactcttggccaagaattcagtggctacactacacaggtaggatttattctagcatcttttgttgtcttatttattaactacgcagttaagactaacaggtagacttattaactatttaagattctatgcaggtcaaat

SEQ ID NO: 6171 - DNA, 449 bp, Zea mays
atcaagcgaactccctccccttgatgttccactcccaggcattagcattccctcacctctaccagattttgtagagccatctaagacaaaagtcactactcttccaaatggcgtcaagatcgcctcggagacatcatcggtactgccctgctctcacatatgttgaagttctggttttgttttgttttgtttccgttcttttccatgacatcaatgttttcttatggacttaactcagagcccagcagcatctgtgggtctgtacattgactgtggttccatttatgaaacacctgcttcatctggagtatcacatctgttggagagaatggccttcaagagcacagtgaatcggactcacttacggttagttcgtgaggtagaagccattggaggaaatgtctctgcatcagcttcccgtgaacaaatgagctatacctatgatgcat

SEQ ID NO: 6172 - DNA, 379 bp, Zea mays
cgcgcgtcggccgcgcggacgaagcgcgctcgcgcctgtccacagccggatgtggagagagctacgcccgcctcctagccgctcaggttctgttcgtggacgggaagttggacgaggcgatcgcagcattcgaggagcttgcgcgggaggaccccgccgactatcgccctctgttctgccagggcgtgctgtacctcgcccttggaagggaggcggaatcagagtccatgctcgagcgatgccgcgaggtcggcggcgacgcgctaatcatagatccgtcagtgatgataacgccgaacgtggagacggaattcgatggggagaagccggagccggcgaaggtttgacctgtaactctgcagcggatgatctcataaaa

SEQ ID NO: 6173 - DNA, 843 bp, Zea mays
gtaactcattgcgtttagtttgtgtgtgcatcgtataaacttgcttgtacacttcaatacttcattttaatttatagattagggcatttggcactgaagcatttgcagatattgttgaatgctaaatgaatgggtctggcatgagccaatcatcaacttgatattctccaagatccatagatgatgaaggtcggtcaccagaatctaaaactgcagtaggaatattggtggccagttagtgtagttttcaagtgcttgcctggtttgggcatacgatgaaaaaaaaagaccttcaaattcatcattgtttcgaaagaatagttatttttcctctaaatggtaccttattatgacctttttttcatcattttctgaatcttaagttacaatgcttcatcgttaagcccctgaactctgttatatgtgtttggtttgtggtatatatgctcaggttcactgcggatttatgaaaaatagtggtgcagatatggatatcattgatgtcaagtacatacagaaatgcaaattcgtggttgcctctggtattttcgatggttacgacatccctcaccagccatccaatatcagccgccggtctcagaagctgttctgcttcctgatggtggtggacgaagtatctcttgattttatccaaaagaacaccaccgtcaagatcgacagcgctggagggaaatgggttggcatatggcgacttctaacagtgcaccgcctcccattcgacgaacctagaaggaacgggaaaatacccaagatcttgacgcacagactattccctcaagcttggtatagcatttggattgacgggaaaatggagctcatagt

SEQ ID NO: 6174 - DNA, 393 bp, Zea mays
gcatcttctgttactactgcatgtacaagtatattcccaaagagattccacgtttacccactaaaatgtccaaaagaatgttatgtaattctcagtgcagtcaatccgtgagcattgacataatttgttccagggtatgtatggggaatatttacctccgtgtaagttctgtaggcaaatacaaaactttgtacagtcagcaggaatagagatatacaataacgccagctggtacctgccggatcctcaatcttgagaaaggtcggccctggataagtagttattatcctcagcaatcaaatcaatagaaaaaaaaattaatgcaaaagaatgagcctctccacaatgaacatatccaagccagtaaaaataggtatttcgccagcactacat

SEQ ID NO: 6175 - DNA, 397 bp, Zea mays
cgccattgttctcggtagctctttggtggtagtggacaaggaggaggaacgggaaaatgctgatgagccacaaccagcggttctcggtagctctttggttgtggtgggtgagggtgagaatgcagagccctccaagtcgaatgtcgaagaatcaggtgccaagaaggaaggagcgaagcatgagacgagtgattcgagcaaggacagcgattactccatagtgtctagacagcgaactgcggaggaagaggatcttgagtgggatgagattgaggatctaggagagcatgaagaaaagaaaggcggcatccagacctcaagccctgctctgaaggaggagctgcgcaagaggctgagcattgccgaagatgatgaggatttaagctgggatatcgag

SEQ ID NO: 6176 - DNA, 424 bp, Zea mays
tcgcattacaaataaaacaaaaaacaaagatgcgtgctttggtcgttttttattttccgattcgggataagctcccccccttttttttcctggctgcattttgctgcacactggtggaacctcccgatctcgtcctctgcctgtaaagagttcgcgggaatcggtggatctttccgtcatctggccagtggccacctgatttgttcgtgattttgcccccctcttccccgcaccacccagctccgctcctgggtttcactctgaccccgtgtttgggctgggacaaggagaaaccgccaaaggagagatttcagatttgttttcccgcgacactcggaaacacaagtgtaatcccccctaccgttctctctgcccaagtgtcgccattaatggccaggcctctcccataaagcaccatcaattc

SEQ ID NO: 6177 - DNA, 477 bp, Zea mays
aatatcttccgtacttcgttcattatcttcgtgtttgtgtatgtgtgggtatgtttctatgctttcctttagtctgacttgtttgttttgcagtggatgtacatcattccgcttggtcttattgtcatgaatgctgttacggcagctgccaacataccagaggaagctgcagggcagggccaacctggagcacaacgggcacctgctgctgttgctgggaggaggagatgatggctgccttccataccgtagttaactatcttcacattgttttctgttttttttggggtattgtatcaatcttaccttgactgcatcatctatggcactgcatgatgatgccatcttttgcttgtgttgaaacacgtagcctatccaagacaatgtggttcctatacatctgtagccaattttggccactagcatgccattggacactgaaactttgcttgaagcctgtgcacacatcatttgcag

SEQ ID NO: 6178 - DNA, 964 bp, Zea mays
aatggacaggggacaattctctggctgaaagtactaactgccaaagggccatgcaccttattctcaggttgtgtctctcagaggggtgtgatacttctccagccttgctttgtgctgatggatgctccatgatagaccgaagaatggtaggctgcccacctcattccagctacttgtgttttcttattatgtttgactttgtatctcttgtacctcttatgtcttactaggaagttatcattcaattgcatccttgcaagtcccatctcgttcataactgaaactgctttagctcatatatatatggaaatatataaatacttcggatatttttctttctgggttctataggagaaaccatttataggatgctgttgtaggcttgtagctattaaaaatcaggaccaaagacttggaacataagaggattgtgaacattaataatggttcaatgtatgggttttggaaacatacgtgaagtatgtcgttgtgatttgtggataacagcatagattgctttgctgttagcgaacactttgtcaaacttcttaatcttctctatctctatgcaagtgttagtttcttttagtttgatcgtgttctttgtcttattgaagtattgttaattcccagtggttgtgcttcctgtagactacatattcatctcgtggaaaacctagaaaatttaccaaccattttgacgcttttcgtcctggcctcctgggaacagcaagttatctaaatgcttgtcttgaacgtttgtacatgtttatcatgcaccttgtttatcgaactgttgactgaaatctgtgcagggcatatatggctacccaattgaaatccaggctctcttttttatggctatgagatgcgccctgagtctgttgaaacaagagtccgatgctgacttcgtgaaccacatcacaaaaagaatccaagctctgagctaccacttgcacagtta

SEQ ID NO: 6179 - DNA, 535 bp, Zea mays
tcaacccttcaagcatttcaccaagtgtccagttctcccttttattgggattttcctaatgcttataaaaccaagggatgccatggtgttgctaacgatccatccccgtttcctctgtaggggaccgtaaagttgcggcgatagggatccacggttctcggatgatagtttatcacgggctcgcactaaacataacaactgaccttgctccattcagaatgattgatccttgcggcataaaggaccgcggtgtggggagcattaaggagatactacaaagggtgtctgatgcggaagagatcgatgacgcgtcactgatggatatagtgtatgattccatgatcaaggagtttgcggaactcttccagctcagtctagacttcagccctggttgcagtttccagtgagaacaacgcttttagcagaccgtatgatgctgccgttgtattctggacggaatgttagctcacggcctttcgtgctcggtatctccgtgtctgctgcactccaccatgtataccacatccacctttca

SEQ ID NO: 6180 - DNA, 1238 bp, Zea mays
  misc_feature (60)..(65): n is a, c, g, or t
cgactccgcgatagtaggcgctgaacaagccacacccacgacccatggaccctgagtgcnnnnnncttgctgccagcaccactggtcacgacgcactccttgacgatgccactggtcagagttatgcttagcaaacaagaactaaccatatcatgcacgctaatctcgacatggttgatgcttgacttctggtcaaattcttaaatatgttctttgtcttgaaactcgaattcagaagaaataataaatagaaggctatgacaatcactgcataaatagcataaaagctttcagtttttccaatgttacataacatacaaacgctaaccaatttatgtcatttatttaaatcatttcatgccaatgtcagtcatcaaaatgttaagtcataaagatttaacaaaatattgaaacccaatgtcagtaccagccaaatcgaattccatggataagaatgcaaggatagcttgaatcctgaaacctgtgtcaatggtgataggtttcaggatagcctgaatgcaaggatagccttaatcctgaaacatgtgtcaatgtaaaatcctgaatcatgaaacctatgtaaatagcagcaaaatgcaaaaggcttatcagaatgtactcttaactggcaaccaatactccatgtacatgtttcaggattttacattgatgcaaattgcaaaaagtggattatgtattaatagtttctcgattttgtttatcgctgtcatataaaagattattttttctttttcattcaaacaagggaaccttaaaaaacatttggtggatcacaaataaccaccacaccactaatatagtaacctaactcaaactgatagagaataagacatcatgtgctaaaacaaaatagtctgagtctctaagattgttctctatcactaataagaacagaatgaggctacactacttattttcctttaaataagttatacgggatggaaaacaaattatcaagatacctgaaggcttggtcatatccttagcacaagatgtgtaaccatcaatagaggtcttgaagaagacataagctctcttcttgtccagcctagtcatgcacatctcaagagtaacaacaagctcctcaggggtgctcagtggtggcatagtagacgtgccacttctgcttatgctttgcagaatcaccaatcacataagcattaccaccaaacctgaggccatcgaagaagtgatttaggaaggtaacctcatcaaca

SEQ ID NO: 6181 - DNA, 361 bp, Zea mays
gccgcagtgggcggaccagccgacgacggccaagtatgtggagagcgcgtgggggattggggtgcgcatgcggaagggttccttggtgaggaaggaggtggagaggtgcataagggaggtgatgggcggggagaggaagcatgtgtacgggaggaatgccgctcgttggatgcacaaggccaaggaggccatgcaggaaggaggaagctctgacaagaacattgcagaattcgcagccaagtatttaccaaagtagatttccgattatgttctcctcggataatgagttttttgggcaataaagtttcttgtctttagggctaatttcgaaacttatcgtgtgcttggtttgtagagtcac

SEQ ID NO: 6182 - DNA, 500 bp, Zea mays
ctctcaagtatgctggtcccttttcatgtacacatgctatgttttttattggcgctaacatgctattatcttgcgttgcctccagcttctttaatttaggtgcttttatcaatgagtttgtaggcacaaaagctcataagcctgtgtggatgggagcctaggtggcttccaaatgttcaagactgtgaagaaaattcaacgcattcagctaaaaatttaccctcagttggacctgacgaacggttatatccccattttgttgaacataacaaaaattcattttctgcatcagccaagaaagataaggggaaaggcaaattgcccgttggagattctggatgcagcatgaggtcaccgttgttagattgtaacctgtgtggagctacagtcaggatgcgggactttagacctgtattatgtccttctcgtttcagtccaaataacattgttgtgcctggaacaggcagaaagctaacactgacacatggagttagtgctgc

SEQ ID NO: 6183 - DNA, 550 bp, Zea mays
gtgtcgatacttaaacagtacaacagaaattttactaaagggttcatgcagttatgcatacagaattgtagttcttgtcatattccttgagtaacccagctttagttcaattcgtttggggtggtttcatctcacaagaatgcttatcaaatgctctttgcttctgtaggcagaatttgctgcctgtgctgttgattttttgcacagggtgggccgcacagccagagctggtcaatctggtatagttactagcctatacacagaggcaaatcgtgatctggtaagagcagttcgtcaagcagaggagttggctcagccagtggtaggattctgttttcatcaccctctggaaggttataatatatatatttttttttctggagaagcatttgcataataaaaatgttaatgtttaaacaggagagagcattcagcaggaaaagaagctttcgcaacaaactaaagaagcaagcattacaaaaacgcgaagcactggtatcttgatagcgtgactcactatatttgtagtaaggagaaaatatatgttttt

SEQ ID NO: 6184 - DNA, 350 bp, Zea mays
ctcgcgatggatggcttcgacgtcgtcctcggggtacaatggctgcgtaccctggggccgatcttgtggaacttcgccgacctcaccatggcgttctggcacaaggaacgggctgtccgctggtccgggatcggtggccctcagccgcagctcgctgcgctggccgtcacgagggatctcctgacgaccctactcgactccttcaccgacatcttcgacgaaccgcgcggcctcccaccccctcgacgccatgaccatcgcatcacacttctgccaggaacaacaccagttgcggtaaaaccataccgttacccgcagctgctgaaggatgagatcgagaaacaatgcga

SEQ ID NO: 6185 - DNA, 1132 bp, Zea mays
  misc_feature (1117)..(1120): n is a, c, g, or t
  misc_feature (1122)..(1126): n is a, c, g, or t
ctcagcattgcacacagcaacatcagctgcagtgccctgtggtgttaaaagaaaataatttcagcataaaactaattttccaacaacgaattgcaatagaaagtaaccacttgcataggagcattgatagcagcatgcttaatgtgacctctttggccaaaagtcgcatgagccatatttagaaaacggcgtgtcacatgagccatatttagaaaatggcatgatcgccaaagcaaagtataaaattcacacttctcatgtgctagctgtttctgtttcacttgccaagccagaaccttctttctattgctataccagagtttcggtgtatcttttgcttccttaacaaaaatctgacaagagagaaagggttacaagagcccatgaaggctacatttcttgtaaacatcgctactcaacaagtttgttgttttcaggtttctagctgaccagcacaaaccaatccaaaggccaaagctcatatttaagtgtaatgaacactaaggttgattgctgcttaatttagagctatgtttgtttgacaagtttgtaccttcctacgtttttccgtatgcaatggagagatttagcatcttatagctttcctcctctcagcaccaaaagcatcctacatcacaagaaaaagcattagagtccattttgttccatacatgccatgtatattttcatgctaataatatttcatagatccatatccataattaacccccacagtgtacaagttctggaccagacgacatggaaggtataagaaaaaagaaaaaaattgtatgtgtgtggaagtgcagtacaaaagctaataacctggtagtgaacataattttaacatttagaaggaatcaacagaattctcaaaaacaccattaaaggtagcataccttcaacaacagcatgggagatttctcttgatcgggttgaggatgctactcaagaattactttctcttcttcaacagtctcacgaatatgctgatacatgctcatggttgtcctggaatggaaatcacagccagctatgaaagcatctaacatgcttttgcaatcagcaggatgcaccaacatcacgagttccagctgcacgcaaaacaagtttgccnnnnannnnncaaatc

SEQ ID NO: 6186 - DNA, 1017 bp, Zea mays
  misc_feature (999)..(1000): n is a, c, g, or t
  misc_feature (1014)..(1014): n is a, c, g, or t
tcttgatctgctgtccaatatcagagcaagttggttggtcttgaagtggatttatatggcagcggagaagattctgatgaggtctgtgaatctgccaaacgtttaagtttgtctgtcaatgttcatcctggtcgtgatcatgcagatcccttgttccacgagtaagtttcttatttactatactcattccgtcttattctgttagacacatttgtacctgtgtaacatgcctaacacatccctttagagagtgaacgcaaaattggtacttccattgtcaacagtcaagacagtttttttgcaatattattagataaatgtgtaggttttgtgatcttaatgaactgaaacacaggttagacaaagttatgtaaataagattagggaatgagtggtaatgttagatgacctggtagtttcataataagataagatttaacatttctggtgtacccatagtcacaaagtttccggatcaacggggtcgaggaacggagttgagaaacatggtacgctacttgtgagtggtttttacatggtgggaacgaaaatgaccctgcattcgaggacgtttccgggttgagggtcgctaccactgtacccgtttcttgtgactatgggtgtacataggatacaccagtggcagatctagcctattgctgtgcgggcacatggctccacaactttttgtcagaacatgtttaggcccttattaaaattacaattgtaaactacaatcaacttgcttggccccataggttttcaatcctagatacgccactgggatacaccaactgtttgtgctagactgaaagtttgaaacactgattctccaacaggtataaagtattcatcaatcccagcaccacagatgtggtctgtacgaccaccgctgaagccctggcaatgggaaagatagttatatgtgccaatcacccgtcaaatgagttcttcaagcagttccccaactgccgtgtctatgacaatgaagacgcagtnngtacaactaacacngaa

SEQ ID NO: 6187 - DNA, 373 bp, Zea mays
tcatcatgagggagttcaggtccgggtcctctcgtgtgctcatcaccaccgacctgctcgcccgtggtatcgacgtccagcaggtctcacttgtcatcaactacgacctgccgacccagccagagaactacctccaccgcatcggccgtagtggtcggtttggaaggaagggtgttgccatcaacttcgtcacccgcgacgacgagcgaatgctgtttgacatccagaggttctacaacgtgaccgttgaggagctgccggccaatgtcgccgaccttctctagatagtatggctgctaaggtttctggataaaggagtttgtttttgttaaaatacgccaacttttctctgctttggatgagtgggtaaggt

SEQ ID NO: 6188 - DNA, 401 bp, Zea mays
gcgctctggcaaggagcttgagaaggagccaaagttcctgaagaacggtgatgctggtatggtgaagatgatacccaccaagcccatggtggtggagacattctcagcgtatcctccccttggtaggtttgctgtccgtgacatgaggcagacggttgctgttggagttatcaagagtgtggagaagaaggacccaaccggcgccaaggtgaccaaggctgctgccaagaagaaatgatgcgatcctgcgcctgctttagcaatacctagttttcatcattacaagttttgtttgtggtcgttgctgttattgtgtgaactgttgagctctgttagcctgtgcacttttatctatttatttggtaccttcttgctatttcaccttctgcaatacaagaatg

SEQ ID NO: 6189 - DNA, 371 bp, Zea mays
tgtcggtgacgaacgcgcttatcaccacatacgccaagtgcaagagggcagacctcgctgcccaggtgttcaacgagctgggcaacaaaaagacacggatctcatggaatgccatgatcctcggcttcacgcagaacgaatgccctgaggatgcagagaggctcttcgctaggatgcagttggaaaatgtgagaccagattcgttcaccctggtcagcgtgattcctgcagtcgcggacatttctgatccgctgcaagcaagatggatccatggatattctatcaggcaccaactagaccaggatgtctatgtcctgacagcccttattgacatgtactccaaatgtgggcgtgtcagcatagctagaagg

SEQ ID NO: 6190 - DNA, 432 bp, Zea mays
gaagagaacttcgaaggccgctcagccttccaagaggaccatccagaggcgcgtcctgatgtccatgcgatgagctgagaaagctatctgctctgccatggcttccctttgtctgctgctttcttagcggcaaccggcaagtcgtaaccaaccattacgccagttttgcctgaaggaggggtggggccgtgggggctcctggttctctgcttgaggaccccggggtatgcggcttactactagctctctgcttgagggtacacattattatggtgaccgcgtatatcctctctacgattttaagcaccatgaattagtgctacgtggtcttttttagtttgagaaattagtagttctatgtatagttttatagtgtggaacggatatgagaaattagtagcaattgtgacttcgacagcttgaatactgttg

SEQ ID NO: 6191 - DNA, 915 bp, Zea mays
gttgcgtttctttctaccttcagtgcaaaggccagccttcgtcagaagatcgagtgtaatacctgactgccatagcgtttgcatttcgttgttttcttcctacttatatcaaaagcacgtaggtgttgcatgatgaagttctcatgattactcacttcctcaacgtttttctttgtctgtttggtgaagcagttatattcaaggtttatgacatcgatggcaagggaaaaattaccttcaaggatctgctagaggttttacgggacctaacagggtcattcatgtccgaggaacaaagagaggtgcttattatatatctaaattggccgtgtggtttttatacggaattgtgcaatatcagcgtgagacatatcatattgacgtcttgcagcaagtggtaactgaagttctggaagaagcagggtacacgagggattacgcattctcgcttgaagattttatccaggtgcagaaatccttttccgtgtccatatatctgttttccctccctctgaacacatgcaagagaattgcgtgttgctgtattgatagcctaggtagaaacaatccacgcaaaaagcgcgtttttttctattaagaggggaagcaaaggcgttagtaaagccaaaatccaccgctgtatcatatcataggctatttgcatattcttcgatgtctattgcggttccatatccatctacaaaccttgtggccgtcttatatgtcggtagcacgtctgagaatgtgttcttgtggctgttgtttcagatcatcgaccatcctggccttaagatggaggtggaagtgccaatcgactagtgaaatgtggaaaacaagcttccggttttgtctgcagaacatggttagtgtcatgtagcagggcaatgaccgttcactttcgtcatcttattgttt

SEQ ID NO: 6192 - DNA, 699 bp, Zea mays
gagcatcataggttctactgtacagtttgccctcttgaaagatctaagaataaagcctcacctggtccgtgtaaaggccatcttatgagaaaattcattaaagaatgctggagtaaatgtggatgtggcatgcagtgtggaaatcgtgtgattcagcgtggtataacatgcaaattgcaggtatgtttaagagatttgcaatgccatgtttctttctaaatggtagtaaccgagagcttattaatgtgcaatatttgctggttatggtcttctctaaaaaatgaccattgcattgaaatgccttcatttatgtgctgctgtatgcctatatgcttatcatgtgtatagctagttttcccaaagcacaccaaaaaagtactatgtgtctttgatccattcttgaattttatctagttcatggttctcgtatgttcctccacttggcttcagttccataaacaactattcctttatgttgcaatactacatggtataggtgttctttacacgcgagggcaaaggctggggagtacgcacagtagaggatctcccaaaaggttcctttgtctgtgaatatgttggagaggtactaacaagttctgaattgcacgaaagagcaattgaaaatgcaagaaatggtaaacataagcatcaagtactcctggatgctggttggggttcaggtgtattgagggatga

SEQ ID NO: 6193 - DNA, 605 bp, Zea mays
tcgaggaactggacaagtacatctcagcctcgaagaagcagaggaggaagcagtgagttctctagtactgcagctactgcccttatgcatttgatctaaactccgttgttatgtcattattagtaggagatgtaaacaatagtgacatgcccttccatgaacttaggcacctggatgagaagaaaaagaagcgcaaggacaataagacagaaactctaccagactttcctgggcgcgagaaagtcaaatttggtgaagttgttgtggctccaccaaaattgtcattcccgaaggtagttacttctccacatggctctacatgaatccttttgtgcgatctgtattctggattacacatcgatggttctatacttctataggtgaagagtgcttcagatgcttctcgcgagatgctgaggaaagaggcaattgagaattacagatatatcaaaggctggacatcgaggcctggactgcagcttccaacgctagcagaatcacaatagatattttctctgtttatcgttgtcaaacttactctgtttatatcagagaagtttagagtatcaattgtgtaatttgtactctcatgtaggcaattccga

SEQ ID NO: 6194 - DNA, 483 bp, Zea mays
gttgagatccctgtcaccgaggtggtccttgctaagcaccctagaccaccacttctcatcaaccttgcagagtgctcttaggtcattgttactaattattttttgtacaatgtgcaatctgtgcagaactccacaattgtatgggaactccgggtgctgagttgggaagtgagctatggcgccgagttcacccccgacgcggagggtgggtacaccgtcattgtacagaagacaaggaaggtgcctgctaacgaggaaccgatcatgaagggaagcttcaaggcaggcgagcctggcaaacttgtgctaactgtgaacaaccctgcatccaagaagaagacgctcctttacagatcgaaggtgaagagcaccagcgagtgagtgtgaggtcacgccgctagctgcctgggccctacagttaaaacgatctacagcatgatagaagagagaaggaaccttttggtttggttcgttaatttactg

SEQ ID NO: 6195 - DNA, 595 bp, Zea mays
  misc_feature (588)..(590): n is a, c, g, or t
cgagagctgtttggaatcccatatgccagatacgcctgcaatgcaggtgaataacacacaggttaataaagtttttttttaaaaaaaagcataaagcataaaaaaaaatcttgtcgctgtagaacatatatatccagcattacatgcatgataagcgaattgtaaacgttaatccagaaggccaacttaacgctgttctccgacacgctcagatcaactctttcaagctgttccacaagcaacctaataaaaacccaagagagaaaggaaactgttacttgcgaatttcaggagagccatttgatcagggcatggttttgcagtgatttacttttggaaccaacctgtagtgggtgatcgcgtaagagacatctggcatctggttcttgtcaactgatatggaagctatttccaccgccgtgcacttgttgttcggtgtgctgttttcctctccgttcacccgccgaggaaggatgacattcgtggatgatcttgacaagaatggcgagcgggccttctcaggctttcctgctggcgcctcggtgcgcagaagatagtatatggatgccatgcatctgaccatttctnnnggata

SEQ ID NO: 6196 - DNA, 471 bp, Zea mays
ctgccatccaccacatccccgggccggagggcgtgcgtgggcgcaactcagacaacacgctcatcaaggagaagcttggctgggctccgactatgaggctgaaggtactccaccaaacctcgcacgtaccatcgctccagtccctgagctggatcacacctacatagtctgatcgttcattgcactggactcaaatttggcctgcaggacgggctgaggatcacgtactcctggatcaaggagcagcttgagaaggagaaggccgagggcatggatctgtctgtctacggatcatccaaggtcgtgcagacacaggccccggttcagctcggctccctccgcgccgctgatggcaaggagtgaactttggctgcgccggtcagttgcagggcatgatataccagtaatacacagttgtttcagtttccatgatttgtagtcaccatttcttgattcacatttgactccaca

SEQ ID NO: 6197 - DNA, 465 bp, Zea mays
atgattttatcagtgtagagcgagatagttttgtgcctattcatgtaaagccggctgacatagcacggctcaatgactcagcgttataaatgaatgaacacgatagtttaaaatggttacaggagaggacagatgaatatcgtttaaacaaaaacgatatgggtgaggtggtggatgattttgatgatcttggaaagttaggacaggggttctcatctgttgatgaactagaggaagtggacattggagacggaaaggtgccaaggccaacatttgtaagtgctaaattaatagccgatcagaggcaaaaggtatgtgatttacttagagaatttagagactgttttgcatgggattatactgagatgccagggctgagtagggagttggttgagcataggctaccaattaagcatgggtttaggccacataagcagccacctagacgatttaaccaccacatcc

SEQ ID NO: 6198 - DNA, 381 bp, Zea mays
tgcttccacctgtaagcttgcaatggatttcccagatgtacttgcaacattgccgttcagaacctcttctgcacatttcaagtgtggttttgagaaaccgtttttcttatgtgttgaaccattcttgttttccaacttggcactatccgatgagttggtgttgttttcctcacagcgatgttgattaaccttctttactggtgtaagggtcaggtgagcttcaagaggctcagctttgttcacaatggaggacactgttttaccatgcaagtcaatcaaatggtagagggatgatgccctggtagaaatctcagcatcccgcttgcatctcatcagtgcagagagtgaattaaggcatggcctggaccgacggaataactc

SEQ ID NO: 6199 - DNA, 552 bp, Zea mays
gcacttgtgcgtgagctgcaggcgctggaggagcatctcaaagcccacgtaataagcctgacctctctgtctctctgactgaatgtgtttgtttcacagacggaccctgcttcgtcctacactctcaatgatgctgtgtctgtgtgcaggggcggccctacatcagcggggagagagtaacagccgccgacctcagcctggcgccgaagctcttccacctggtggtggcgctggagcatttcaagggctggaaggtgccagaaagcatgtccagcgtccacgcctacacccaggtagtagcatttccagagtgcttgctcatcaagatacatcccatcccgtatgagtatgacctgccctgccccacgatcgtcttttgtgccgcaggctatgttcagccgcgaatctttcatcaagactaagcccaccaaggagcacttgatcgcgggatgggcggcgaaggtggccaagccgcccaacctcgtcgtgccttgctggctcatctgatcagtcgccgtcggtggtgcgttgctggttcattatgattgggtt

SEQ ID NO: 6200 - DNA, 245 bp, Zea mays
ggccggccgcgccgattggcatgcatggacgaggtctgtctgacgaagatgtgtcgagacctcgccggcggtgtggtttgtgatgattgattggttagttggctaatcttcagtagctagctagctagctagctactgattagaacagctagcagtagtgtgtaaccgcgcgcgtgtcgttgcctctgctggtcgagaggattgaagcacgcattgtgtacataataataggtaggagtcgtcgt

SEQ ID NO: 6201 - DNA, 1435 bp, Zea mays
  misc_feature (349)..(351): n is a, c, g, or t
  misc_feature (358)..(363): n is a, c, g, or t
  misc_feature (367)..(373): n is a, c, g, or t
  misc_feature (379)..(380): n is a, c, g, or t
  misc_feature (383)..(401): n is a, c, g, or t
  misc_feature (403)..(403): n is a, c, g, or t
  misc_feature (416)..(420): n is a, c, g, or t
  misc_feature (427)..(435): n is a, c, g, or t
  misc_feature (439)..(454): n is a, c, g, or t
  misc_feature (456)..(458): n is a, c, g, or t
  misc_feature (462)..(464): n is a, c, g, or t
  misc_feature (477)..(484): n is a, c, g, or t
  misc_feature (488)..(489): n is a, c, g, or t
  misc_feature (492)..(498): n is a, c, g, or t
  misc_feature (503)..(508): n is a, c, g, or t
  misc_feature (511)..(513): n is a, c, g, or t
  misc_feature (517)..(529): n is a, c, g, or t
  misc_feature (531)..(533): n is a, c, g, or t
  misc_feature (538)..(545): n is a, c, g, or t
  misc_feature (549)..(549): n is a, c, g, or t
  misc_feature (551)..(553): n is a, c, g, or t
  misc_feature (555)..(556): n is a, c, g, or t
  misc_feature (560)..(561): n is a, c, g, or t
  misc_feature (564)..(568): n is a, c, g, or t
  misc_feature (573)..(581): n is a, c, g, or t
  misc_feature (583)..(587): n is a, c, g, or t
  misc_feature (590)..(596): n is a, c, g, or t
  misc_feature (603)..(606): n is a, c, g, or t
  misc_feature (610)..(612): n is a, c, g, or t
  misc_feature (614)..(616): n is a, c, g, or t
  misc_feature (618)..(618): n is a, c, g, or t
  misc_feature (621)..(639): n is a, c, g, or t
  misc_feature (641)..(652): n is a, c, g, or t
  misc_feature (657)..(665): n is a, c, g, or t
  misc_feature (670)..(678): n is a, c, g, or t
  misc_feature (685)..(686): n is a, c, g, or t
  misc_feature (688)..(696): n is a, c, g, or t
  misc_feature (702)..(707): n is a, c, g, or t
  misc_feature (709)..(709): n is a, c, g, or t
  misc_feature (715)..(715): n is a, c, g, or t
  misc_feature (718)..(718): n is a, c, g, or t
  misc_feature (730)..(736): n is a, c, g, or t
  misc_feature (738)..(741): n is a, c, g, or t
  misc_feature (749)..(756): n is a, c, g, or t
  misc_feature (760)..(760): n is a, c, g, or t
  misc_feature (765)..(777): n is a, c, g, or t
  misc_feature (779)..(781): n is a, c, g, or t
  misc_feature (789)..(796): n is a, c, g, or t
  misc_feature (798)..(801): n is a, c, g, or t
  misc_feature (805)..(806): n is a, c, g, or t
  misc_feature (808)..(809): n is a, c, g, or t
  misc_feature (820)..(830): n is a, c, g, or t
  misc_feature (832)..(836): n is a, c, g, or t
  misc_feature (843)..(856): n is a, c, g, or t
  misc_feature (858)..(874): n is a, c, g, or t
  misc_feature (881)..(881): n is a, c, g, or t
  misc_feature (886)..(888): n is a, c, g, or t
  misc_feature (893)..(893): n is a, c, g, or t
  misc_feature (896)..(898): n is a, c, g, or t
  misc_feature (900)..(906): n is a, c, g, or t
  misc_feature (908)..(909): n is a, c, g, or t
  misc_feature (912)..(916): n is a, c, g, or t
  misc_feature (919)..(919): n is a, c, g, or t
  misc_feature (921)..(927): n is a, c, g, or t
  misc_feature (929)..(938): n is a, c, g, or t
  misc_feature (940)..(946): n is a, c, g, or t
  misc_feature (949)..(950): n is a, c, g, or t
  misc_feature (954)..(982): n is a, c, g, or t
  misc_feature (984)..(991): n is a, c, g, or t
  misc_feature (993)..(993): n is a, c, g, or t
  misc_feature (995)..(1002): n is a, c, g, or t
  misc_feature (1008)..(1009): n is a, c, g, or t
  misc_feature (1013)..(1015): n is a, c, g, or t
  misc_feature (1026)..(1041): n is a, c, g, or t
  misc_feature (1043)..(1046): n is a, c, g, or t
  misc_feature (1048)..(1055): n is a, c, g, or t
  misc_feature (1058)..(1065): n is a, c, g, or t
  misc_feature (1067)..(1067): n is a, c, g, or t
  misc_feature (1070)..(1076): n is a, c, g, or t
  misc_feature (1083)..(1084): n is a, c, g, or t
  misc_feature (1089)..(1091): n is a, c, g, or t
  misc_feature (1093)..(1107): n is a, c, g, or t
  misc_feature (1110)..(1115): n is a, c, g, or t
  misc_feature (1118)..(1121): n is a, c, g, or t
  misc_feature (1124)..(1127): n is a, c, g, or t
  misc_feature (1133)..(1139): n is a, c, g, or t
  misc_feature (1143)..(1144): n is a, c, g, or t
  misc_feature (1146)..(1148): n is a, c, g, or t
  misc_feature (1152)..(1152): n is a, c, g, or t
  misc_feature (1154)..(1156): n is a, c, g, or t
  misc_feature (1158)..(1165): n is a, c, g, or t
  misc_feature (1169)..(1183): n is a, c, g, or t
  misc_feature (1186)..(1193): n is a, c, g, or t
  misc_feature (1196)..(1197): n is a, c, g, or t
  misc_feature (1204)..(1209): n is a, c, g, or t
  misc_feature (1212)..(1212): n is a, c, g, or t
  misc_feature (1217)..(1218): n is a, c, g, or t
  misc_feature (1220)..(1223): n is a, c, g, or t
  misc_feature (1232)..(1235): n is a, c, g, or t
  misc_feature (1239)..(1239): n is a, c, g, or t
  misc_feature (1241)..(1243): n is a, c, g, or t
  misc_feature (1245)..(1247): n is a, c, g, or t
  misc_feature (1249)..(1252): n is a, c, g, or t
  misc_feature (1254)..(1263): n is a, c, g, or t
  misc_feature (1270)..(1274): n is a, c, g, or t
  misc_feature (1285)..(1285): n is a, c, g, or t
  misc_feature (1287)..(1288): n is a, c, g, or t
  misc_feature (1293)..(1297): n is a, c, g, or t
  misc_feature (1300)..(1301): n is a, c, g, or t
  misc_feature (1303)..(1317): n is a, c, g, or t
  misc_feature (1323)..(1325): n is a, c, g, or t
  misc_feature (1327)..(1328): n is a, c, g, or t
  misc_feature (1331)..(1332): n is a, c, g, or t
  misc_feature (1334)..(1340): n is a, c, g, or t
  misc_feature (1347)..(1354): n is a, c, g, or t
  misc_feature (1356)..(1357): n is a, c, g, or t
  misc_feature (1366)..(1368): n is a, c, g, or t
  misc_feature (1370)..(1374): n is a, c, g, or t
  misc_feature (1376)..(1381): n is a, c, g, or t
  misc_feature (1384)..(1386): n is a, c, g, or t
  misc_feature (1388)..(1430): n is a, c, g, or t
  misc_feature (1432)..(1432): n is a, c, g, or t
cgggcgtggtgcctcccgcactggtggctgccgcggctgctggagcagctgccacggctggcatcgcagtggtcttgttcaacctcaagaggtaatctggtggtccgttgcgcggaagttttgatctgctgctatggcctatatgagaatgggttaaccgttttgttagtgtcactggagtcgtagtagtagtatctttactatcagctggataatagactagatgaacatgtatggcaagtacctttactttctgaagttttcaatggtaataagagtcgtgaacacaaacatgagggataattgagttcttgtctggtcttttgagttgcacctgattccagacttnnnaattaannnnnnaatnnnnnnntgctanngannnnnnnnnnnnnnnnnnngncttggcagatacnnnnncctgtcnnnnnnnnnaggnnnnnnnnnnnnnnnngnnnggtnnnacgagagtcctgnnnnnnnnttannctnnnnnnnaatannnnnnctnnngttnnnnnnnnnnnnntnnngcggnnnnnnnntganannncnncgcnngcnnnnnagctnnnnnnnnnannnnnacnnnnnnnctccttnnnnagtnnngnnnantcnnnnnnnnnnnnnnnnnnncnnnnnnnnnnnntactnnnnnnnnntttcnnnnnnnnngcttacnntnnnnnnnnnccctcnnnnnntnccttanccncccacctctacnnnnnnncnnnntttcttcnnnnnnnnccgnttcgnnnnnnnnnnnnncnnnctctccannnnnnnntnnnncttnncnnttccttcgtcnnnnnnnnnnntnnnnntctctcnnnnnnnnnnnnnntnnnnnnnnnnnnnnnnntcttttntcttnnngtccnctnnntnnnnnnnannctnnnnntcncnnnnnnnannnnnnnnnnannnnnnngtnnttcnnnnnnnnnnnnnnnnnnnnnnnnnnnnngnnnnnnnncncnnnnnnnnctctcnntaannncttttcccctnnnnnnnnnnnnnnnntnnnncnnnnnnnnccnnnnnnnntnctnnnnnnnatccccnnctatnnncnnnnnnnnnnnnnnntcnnnnnnctnnnnacnnnnactatnnnnnnnttanncnnnacantnnntnnnnnnnnactnnnnnnnnnnnnnnnttnnnnnnnnctnntctctcnnnnnnatnctccnntnnnncttcttcannnnttgncnnncnnncnnnntnnnnnnnnnntcaattnnnnnctctactacantnnctcannnnnccnnannnnnnnnnnnnnnnctacannncnnttnntnnnnnnncaccacnnnnnnnntnnccaccaccnnncnnnnntnnnnnngcnnnannnnnnnnnnnnnnnnnnnnnnnnnnnnnnnnnnnnnnnnnnncngct

SEQ ID NO: 6202 - DNA, 191 bp, Zea mays
atgggaggtgcttgaatctgagcaccagcgcctcagcgactggcacacccagctggaggagcgcaccaaggcggcgtcccgccagttcgcctctgagcgatccgaactcgcgcgggaccgcaaggagtacaaaagggacctccaaaaggtgttccccagggagctggaggcgtcccggcgggagaagaagg

SEQ ID NO: 6203 - DNA, 691 bp, Zea mays
  misc_feature (415)..(417): n is a, c, g, or t
  misc_feature (581)..(581): n is a, c, g, or t
  misc_feature (596)..(600): n is a, c, g, or t
  misc_feature (604)..(606): n is a, c, g, or t
  misc_feature (620)..(622): n is a, c, g, or t
  misc_feature (624)..(624): n is a, c, g, or t
  misc_feature (630)..(633): n is a, c, g, or t
  misc_feature (658)..(662): n is a, c, g, or t
  misc_feature (664)..(664): n is a, c, g, or t
  misc_feature (670)..(673): n is a, c, g, or t
  misc_feature (675)..(677): n is a, c, g, or t
  misc_feature (679)..(681): n is a, c, g, or t
  misc_feature (686)..(688): n is a, c, g, or t
tgctggcgccccccctgtggctaatggtaggtgggggagttacactttctcggccgccatcggagggctgttcccgttgctgagcttccaggtgcacggattcccgcaggcgactgcctatgggcctgctgcagggtttccttatggatacggccattctttccatgggtggcatggccatggcttcccgcgccaggcaccacaaggccagcaggtcgatgcgtacttgaaggtgctgctgctggcagttggtgtgcttgtaattgccagcctaatcgcattttagattatgtatggctggcgatgtcgctgatccttgttggtgtgtaccgtagttctagcatcattgcatcttagatggctcccaaagtttgatgtcaatgtgtagagtattgtggatgctttcggctagatnnnctacggtacacaccagcaaggatcagcgacatcgccaacatacataatctaaaatgcgattaggctggcaattacagaacaccaactgccagcagcagcaccttcagtacgcatcgacctgctggcttgtggtgcctggcgcgagaagccatggccatgccacnatggaaagaatggcnnnnnatannnaaacctgcagcagnnntnggcagnnnntgcgggaatcgtgcactggaagctnnnnncnggaacnnnntnnnannncggcnnngaa

SEQ ID NO: 6204 - DNA, 391 bp, Zea mays
  misc_feature (385)..(386): n is a, c, g, or t
ctgctcggctacgccgtgccgcagatcgacgtgatgctggagggcgggcagaacttcacggtgctcggcggcaactccatggtgcaggtgaacgccaacacggcttgcctcggcttcgtccaggcgccggggcaagcgccggcggccgtcatcggtgggttccagctggagaaccacctgctgctgctcgacgtggacaagaagcagctcggattcaccactttcctcaacgcaatcgggctttcctgcagcagcttcaatttcactcttgctagctagtgtgctgcatctgcatgtatacttaactgtaacaacttgtactgccgtgtattacaaataaataaataaataaataataaagtgggaataaattgattggagtgtnncagct

SEQ ID NO: 6205 - DNA, 401 bp, Zea mays
ctttcgcgatgtcgaaccaagttgctcctccaccatcagttcaaatggctgccatgtctcagcagcatcagcaaatcccaacgatgatgcaaccaaatccctttggaccacctatgcatccacaggtgagcatggcccctgcaacaaacaatccctttctggatgctggcttcggggcattcccagcggcgaacaacggccatcagcaacacaacccatttggcagtgcccaacttctgtaggtcacttagtcacaagagcaaatttgtgccccagcagatgcgatttttgtgtgattatatcatgcattgtgctggacctttcttgcatgcgacgcgtgtattatgttatggcttcaccacacggagagctgtgcctatgtcgtgacccaactcttgttg

SEQ ID NO: 6206 - DNA, 405 bp, Zea mays
ttccggcacataaatagcacaacctctaaccgccaattgttttctatactcttttgctaagccgagccatacccgcccgctccttttctcatagtcatccgggaaacattctctctctggcgacgacggccatggtgcagcagcagcagcagcaacagcacagaatctacatcttgcagttcaggaagggcgggccggagcaggaggtgtcatgcaaggtgtcgcagcccaagggcggcggccggcggccggtcatgtactactaccaggaccacggcagcggcggcggcaagaacggcaagaaggtgcaacctagggcgctgggcctgcgacgtttcttgggcatgctcttcctctccttcctctgcgtggggacgctgttcgtggcgcccgtgtccttcctct

SEQ ID NO: 6207 - DNA, 472 bp, Zea mays
tatatatagtaacatgcatttagccttagcgagcaggtttacacatgctgttgaactgctgcagcagctttgtaaccttagagagttaagagtggtcatcagaagtgatgctcacttgtcctctctccgtgttaccgtctcccatgtcctctaatcatatcaacaagagccaggcgctgtaaaaaaaaagtagtagtaggaattggaaccctacacgactcgaaatgattgtgctatctgtttgaggtccttgtaatgcctcttccactgcagacctgcaaaagattcccagctatttattgtattattcaggataataatataaaaacaaaagagttggcttgcatttctgcgaacaatggctttaccgtttgcagttacactgaagaggtagagcctgttcccagctgccgtggcggtgatgaacacatggggcggctccagctcgaactggtagtaagttcttcccgaa

SEQ ID NO: 6208 - DNA, 731 bp, Zea mays
tcaagctgaagatcgcgcgcacaggatcggtcaggtgaatatcaggcgcatggttttgtagccagcagattcctttgcttttttctttgctgcgtcattatcgataatttgttgttccacttataacatgagctccattcatatattccaggtctcgtccgtgaacgtgtattatcttctctcgaacggtactatagatgatcttatgtggtatgtgctgaacttcgcttcgcttcgttcccctacctaaaaaatggcttgacgttgcggtttaggtcatgtatactgagttggtctttttgttgctctggttctgcttcccagggacgttgttcagggcaaacttgagaacctggggcaggttctgtctctctcataccggcatctgagttttgtttttttttctctagttaagaccatgattgtattgctatgagttgagctggattaaggaagcaagaatccttctgttttgtcagatgctggacgggcaggagaagacgctggaggtttcccagagggactgcaggccaagcccctcgaagaagcagaagacactggtcggcttcctcaagcggcccagcgcgtccacgtccgcggaggagggtatgcccagcacttaatgaagcagcctcggatctgaggcgcggtcgtggcttgtgagcgaaccagatcaggtcataggcagccagcagccacaatggtgttcaggctctatcacgttgtaacac

SEQ ID NO: 6209 - DNA, 365 bp, Zea mays
tctctgccaggttttctctcgcagcccgtgctttgcgcctgattttctttgttttcagcatatgaactgtagaggctgttgccagctgatggttatgattcggcacaaactctgtcaaacggtacttgccattagcagtaagtctaatggtcaagcttgcagggcatccaattcgtgtttcgggacgtgggcactttgcttcctttgctcccttcttcttctcccgaaacccctctctcgagcacacaaaagttctcctagtgattatgttctttgacgtcgtccagagcgttgaccttcggacaaagaagcccaccttttccgcatatgcattgtagaactcatacgcatcgctttcaccatcg

SEQ ID NO: 6210 - DNA, 381 bp, Zea mays
aacctcgtcgctgcatttgttggcacaggacacataagtcagattctgatgtgccagccaggcgcttcctcatggtctgtttgcgcatatgatccgtgtgctgcatttgaagacatggctttctatcagggcaagctctacgcccttgctgatgatgaaaacctcctcgtggtcgacatgagccaagaccaaagcactggcgacccacatgtctgtcgaattggacaggtcatcaagggtgatcccgaccatttgtttgatgcttggatgccagatgacactactggcagaaagaagctgtacctagtcgagtcatgtggtgcattgctgatggtacgcaggaaggtatgctgcagaatggtagacgacacagttgttgca

SEQ ID NO: 6211 - DNA, 693 bp, Zea mays
aagctagcattttcgcatattgtacacagtatcaggaggatgaaccagaagcacaagaatgaatcgacaaatcgtaaactgcaaaacgtcctttttaaattcttacaggtctgcaacatattgtgaatgcattaatcagtggtaccaggttttagcatattgaaaaacaaatacaaatttgttttcccctagctcattttgtacacctgtttgtcaggctgaagaagagtcacgagcaaagagagcatttactatcctttgtgatcttcaccgtcggagggtctggtttgatgaacgcacaacaaatgcaatatgtgatgcttgtttccacccttcctctaggtacatgctgcagaacatttaaaaaaaatttctattcacagctcccagcctaaaatgattgtcattacacacaggattatgatagctgctatttcatttcttcttggatatgaaaatgctccacaagaggatgatagcgacgcatcaagcagtgaagatgaagcagatcaaaacccacaaattcttctcagtaaacaggacgtttataaggtgctttaactgtttaattgtgccttaattgcccatttgtcatttttagatatacttggtttgctttgctttattccctctgatgcatcgtttgcattttcttggtatatgaattctaaggcaaatcacaaggggtacgtc

SEQ ID NO: 6212 - DNA, 352 bp, Zea mays
  misc_feature (344)..(344): n is a, c, g, or t
atgctgtcctgtaaacagctttctcactgatatatcatggaactaaccatgttgtcctgtaaagtgtaaacagctttctcaaagcattacaaaaggacattaaagcaccatcatactagatcaccttgccccacacttggatgatcaggctcttgttgaacatgcagagaagtccccgagaaacaacaacctcagtgtttggtggcaagaaccgatgactccaagaaacagggtatgtaaggggtaataaccgcatagccctttccaagagtgcagagaccatgcagttcctgagtatccatgttatatgatacaagtttctggttccagtgctgaataaggangaacaaat

SEQ ID NO: 6213 - DNA, 398 bp, Zea mays
tcgctaagcgtgtttaattatagttatattagttagttagtttactaattgttgcactactctaggagtaataaccctcctcgacgatctacatacattaccccatcgtctcagctgagctcccggccccagatcgatgtgaactctggccggcaacctgctgattgtgttcgatcagacgttcttccatatgggtttgagaggcacaggcaggcatccatgtgcaaagcggcctgccgcctttgattagcttaacccaggaaggttcatctgctgtatgagttgtgtggtgactacctagctatgaccttagcagcttaattattagcccgtctactgtaaaatgtaacatataagcaactggcagaattttaatatgcacttcctttgctctgagg

SEQ ID NO: 6214 - DNA, 505 bp, Zea mays
attgctggtgctgctacaataaggggttttggtcaagagaagcggtttatgaaaaggaatctttatcttcttgactgttttgctcgccctttattttccagccttgctgctattgaatggctctgcctgcgaatggaattgctttcgactttcgtctttgctttttgcatggcaatacttgtgagctttcctcctggcacaatcgaaccaagtatgtttatgttccacatgctgctccagtgctctactatgtttggtcgctttctccaatgccttattctgtgcagtagaaaacctgcatcttcttgtctgttaaaatttattcagcatctaaatggattttcaaatcgataggtatggctggccttgctgtaacatatggacttaatttaaatgctcgcatgtcaagatggatattgagcttctgtaaattagagaacaggataatctctgttgagcgcatttatcaatattgcaggcttcctagtgaagcaccattgattat

SEQ ID NO: 6215 - DNA, 671 bp, Zea mays
tctagctgaaaatgcgacggcctatgttagcttggagccctgcaaccactacgggagaacccctccgtgtactgaagcgctcataaatgcaaaagtgaaggaagttgtcgtggggatgactgacccaaatcctatcgtggcatccaaagggattgagaagctccaaggtgctgggataagtgtgagggtgggtgtggaggaagcgttatgccgcaaactaaacgaggcttatatccatcgtatgctcaccgggaaggcttttgcaactctgaggtaaatatccgactccaatcatcttcctaatctcccaagtttgctaaatcagtgctcacatttgctctgaaggacctgctggtagatgctaaatggacagtttacagcgctatagagtttgaaatatgagttggacggtagatcctataactaattgtggtctggagaactgttgaaagcccatgtgcttcatccattcgagtagtaatgttcattgttgttgtctgcttatcgaaaatgttctctatgggccattttttagtaccatgtgcaatgtttgtgatggtatttacttgttgttatatgaataacagagctacactctcaatgaatggaatcatcacgaaccagattgggaagggagctgatcagtcaggtgggtactactcgcagctgat

SEQ ID NO: 6216 - DNA, 366 bp, Zea mays
gtggcggcgaaacaagagccagcagccaccattgagcctcagcagattgctagtgaggtgaccacttcggaagtggcggtcgtcgttgtcgagcctgagaacaaagaggaggaggaagttgtggagaagaccgtcatcgagaaggagaagccatcagcagtccatgcagaggaaaatattgccaccaacaaggtggcagccgagcccacgacagaattgaagaaagacaccgaggaggagatatagatggagaaggagaagccatcgctaagctaattgactgcatgtcaattggctgatgcctgatgatcaatgtgcaagaaagagatcgaccactaattggcatacatgtttaagtcgggagag

SEQ ID NO: 6217 - DNA, 543 bp, Zea mays
aatctatttgggtcaacctacacatggatttaagacagagcagcagatacccttccaaagtggttcagttgatatcgttactttcaaggggtcaaaactgaaaacgattaaagaagtctggatcggtcttgaatcaggtacgtcccgtttcatgttctctgcaaatacaatgtaatggtagtaatatgttcacttgatgagtgttttctatcctttgtttattaattttacccttgaaggtcaggttcatggagattagatggtttgagcttgaaagtaatacatggaccagttggtcagcctaaagaaataaatggaactccagaacagaagttcagcggtttgcagtacacttttgagaacgtaaatgtgttccttggagatgatggagcttcagtagctgaagcaaggccgacggctatcactgacctctcaggagtcggcctttctgatcttcaacaagggatgttatcctcaagaagcaaagcttcaagcattcaggaagtaagagaggatgggttgagagagtacgccgaccttaaa

SEQ ID NO: 6218 - DNA, 388 bp, Zea mays
cttggacgagcagggtggctcggttgaggagcttgagatgatgagggctggcagtttagatgcatttaggtgatgaagaagattggtttatttctcacgtgtgtatctgttcatagcatcataggagaataagtgagatggccatttgtcaagagccgcacagattgacaagtccttattggtggttacaagccatggtggcttatgtgtatgcatgggttgattagctgaagttggtgttgaaaggaacattttttgcagccatttggtatatccatgcttagtcaatagcggatttggatgggaaggctagagggagatctgtcatgtggtttgttctggatcagatccatgttttggcagcgattgaagagctggtgatatgtgt

SEQ ID NO: 6219 - DNA, 573 bp, Zea mays
tggtggaagtctgttataaagggtgatcctgaagttgatacccaaaaggtggaacctgagaacagtaaactctctgatttggatcctgagactagacaaaccgtggaaaagatgatggtaagacacataatctgacacacaactgagttctgctgtggcttggaactagctaaatcctttatttggtttgtagtttgaccagcgccagaagcagatgggccttccaacaagtgatgaaatgcaaaagcaagaaattctcaagaagttcatgtctgaggtaagttgcttgaaaaagtaatgatcatctttcagttctgatatttgtatgtaggttggcttgccatcctatttcttgcatctgattcattcctttttttcttttttcttttgccgtggcagcacccggagatggacttctctagagcgaaattagattgaggatgtgtttggccgtttgtctgaatgcgttattagtatgaaacattttttgatcagtttgcatgtaatgcgtcagaaatatctggagatagacttctctagagcgaaaatagcttgaggatgtgttcggccagt

SEQ ID NO: 6220 - DNA, 374 bp, Zea mays
cttgcgtgcttgcacaggaggtgcgcacggggaatctatacgacgcgaagaacggcagcttctatgagaaagttatggacggcgatggtgtggagactgatgtgggatccgtggatacggctgaattgccgatctctagtggagtagaagaggcgaacggtaccgatgtcaaactcacggtggatggtgaaatgatcccacccacccaatcagtaatagaatttggggagagggaaggaatcgattcagaagtcgtggcaaatggcggcgtccagctcaagagctaacccgcaactgaaggatgatttgagttatatggtatttagctgttcagttgcttagtgatttagcttgttttatattacaaggacgat

SEQ ID NO: 6221 - DNA, 368 bp, Zea mays
agtagggaccagagaaagcatagcaatggtgcggaagccgatccacgctgacgacgccggcgctaagagcacggaggcgagcaaggagaggaaggggttgtggtcgccggaggaggacgagcggctcttcacccacatcacctaccacggcgtctccacctggagctccgtcgcgcagctagcaggcaagattcagttcttgcaaaccgatcgggactctcggtacctgattctatttcagctatcggacagcacaacgcggtatgattaatctcttcttaaatgctgaatgcacaggcctgcggaggagcggcaagagctgccggctgcggtggctgaactacctgcgcccggacctcaagaaggaa

SEQ ID NO: 6222 - DNA, 401 bp, Zea mays
gagtctcactaacgaaccgagcaagaaaacttatctgatatgtcaatgggagagtagggaactgccttgctaatccaggatttttcactagatatgcaaagtaaaaggccttgtgtgtgtcatcaaaacctggaatactttgcaatgtttgaagcaagtcaggtggtaggtcatctgaactagccttctcaatagccattgcaagcctttcagcaccatctttgaatgctccaatcagccctgcctcttcattactagtaacctttgccttcttcctaggtctaggagctgaggatgaagccccaatatcatctataggactaggaacagcattaacatctccctcatcaatctatgtttcatactagaaaatggaaagaatggtgtggcatcatcaagta

SEQ ID NO: 6223 - DNA, 372 bp, Zea mays
ctggctgattgattgatcctttccatgttatcatttaaatttcttcctatgttgttccaatgatcactactggctgaaataattatgcatgcttgatggacaaaatttgctaacgccatgcatatgtggcagaatttccatgaaaagctgtccatgctctagcaggtttccattagttaagaaacattctatctactcactttattatttgtttcaacacacctctgaaactatcttttggtcaacgcatctcatgggctcattgcctattgactgcatacaggagggaaggaacaccatatggccacataatcctcaaacaggttggagttactgtgtgatgataccttcttggatcactcaaacacctga

SEQ ID NO: 6224 - DNA, 519 bp, Zea mays
cagggaaacttcacttttactcaaaggactgggtttcactcgaagcaccagaatttacttggttgctggtgaagcttttggcaatggaagcatgaatgctctgaaggacgattttcccaatatttattctcattctacgctggcaacagaagaggaacttgcacccttcaaaaaccatcagaatatgcttgctggtcttgattacatcgtggctcttcagagtgatgtctttatttacacttatgatggaaatatggcaaaagctgtacaaggacatcgtcgttttgagaacttcagaaagactgttaatccagacaggtaatacattaaactgttagatgggtctgttatggtcaatttaattttgcgccgaatgaacatctagccttgtggtttgtgttgtagacaagcggtcatccacttcttcgtctatttttttcttcttctgaatatctgattctttgtcctgcaggatgaattttgtgaacctgatagatgaattcgatggagggaagagtg

SEQ ID NO: 6225 - DNA, 575 bp, Zea mays
tgtaaatttgttggtagagctgaagcccttggacgtggattctgggttggagtgcaatatgatgagccacttgggaagcatgacggcatgtatgttgtgtcctaacccatgaaaaacagaaaatgacaggcttttgtgtcgattttggtactagtcattttatgtgatgtaattctaattgctgcttatgtcatattgcttgatcctgtgatgggtaacctgctattttgatgaataaatggcaatacggtagctcgttataacattttcttggatgctgcagggtgaaaggcattcgcttctttgagtgccctcaaggtcatggggcaattgtgaggccagagaaagtaaaggtactacattcccagctctttaccttgtgtatacttacttagagctagtttggaaccctattttcttaagggatttctattttcccaagggaaattagttcattttctcttgggaaaataggaattctttggaaaaatagagttcccaaactagcccttaagagtaagtttttgttagacgttatctctgcagctgattgccgaaatgtagagacgcctagt

SEQ ID NO: 6226 - DNA, 393 bp, Zea mays
agctggaacgccggcggcgcagctcagtggacgctcccatcgaccattcccaggtttggttctccctcatccggtcctcctccatgtctccatggctgaatcactatcgttctcttctcacgcacgtcatgttgtcaaatccatcactggctttagctcccgtgatctgatcaacagcaaaacgaactcactacacactatgccactatggcatggagtttaattatgagacaatgtaaagactagagcgagtccactaatcacgggtggccaaagaaattcacccgaccaggccttcagagtttagtattttactattattcgtcaccaccctgctacatgattacttgtatataaatagagggcacacgacaccatcctgtaggttgtaga

SEQ ID NO: 6227 - DNA, 552 bp, Zea mays
cattgctggatcgttagctgggaagccatccgatggacgcctggtaaatagttacaattgtgacttggaagatctcccaatgatgcttctgcagcaggtgattaaaactgcccacctcctcctttttttttgggtagatctcccaagcattatgcccctttgtaaaaacctttgtccattgccagttccatgcagagtctgcaaaccattttcagtgccacatgcgatcttctcaccaaagaatagtttgataacttgttattttgtgtatctgcaggttgccagccaagtaatccactggctccacgatgaagcggtggtccttgggatgaacgcgacaatagatttcctgtgcctgtacttggaccttgaccaaggtgaaacactaggcctggtggcacacgttgacccggatgacacctacggctgcgtctcatggtacctcactcttgatcatcacccaacggaggaagggaagatgtcagcgggtagtccggagctagaggagcgcaggcttttggggtacctttccccggaattgctttactctac

SEQ ID NO: 6228 - DNA, 1037 bp, Zea mays
  misc_feature (322)..(322): n is a, c, g, or t
tcaattgctcaaccaggtctgagggtgaatccagctcggccaaacgacaagctcccgtacaggggcgcttggctctgggtgggttctgagatgatccacctgatggagctgccgaatcctgatccgttgaccggacgccccgagcacggcggacgtgatcggcatacctgtatagcgattagagatgttctgaagctgaaagaagtttttgatgaagctggtacgcccggatcttcacttcctcctttgttttgccctaattatatgctgctatgtgacatgatctttgttgtgttgatcatatctctgtctcgctcaatcntagaagatcaatcctagaagagctgcttgtaacgtcagtgaagtcataaactctttcaacctgtgggtgtttgtttagaattataatttgtatagattatataatccaacaaattttaaactaatggtgtgtttgtttcccttctagattatataagttggattatgatgaaaatataggagggtaaaatattactgtaactacaaataagttaaaataagctaatattgggtagcttatttataatttcaaagtgatattttaccctaccacctttacaccataatctaacttatataatctagaagggaaacaaacaagacctaaatgttagtttaaaacttgttggattatatgatctgtgtagattataattccaaacaaataccccacgtaagcctttaccatgacatgattctgtattgtggtctggtttctgtttttcatcaggccagattatcattgaagagtaaagactgactgtaaaccagcataactttcttttaccaaccgtatgaagatatggtttgctctatctcgatactaatgaaatagtggtaaatgcagaaatcagctacacgctaagcaaatccgggaggccagcgatctttgcgagagacccagacgggaacgcattggagttcacccaagtgtagcaactggaagactccttacatgctggagcatctcatggatacctagaggtcatagactt

SEQ ID NO: 6229 - DNA, 386 bp, Zea mays
ttttttgctccaagaacaaggagtctctctcctatcccaaaaggccatgcattcgctgtgagcaatggaaattctagagaatttggtttcagcccgaggtcaccagtaagaaagatggatggtttgaggagcccaccacatcccttgcctcttcctccagcttctggtgcatgctcgcctcttcatccagcttctggtgcatgctcgcctcttcatccagcttctggtgcttgctcacctcttcttccaacccacagtttttgctcgcctcttctttcgtctcccagttcctgcccacctcttcctgcatctcccactaactgctcacagtcccagtcacaatggaagaaagggaaattgctagggagtggtacatttggtcaggt

SEQ ID NO: 6230 - DNA, 757 bp, Zea mays
tgttggctttgagacaaaggaactgctctgaacctccctggaatccctattgcaattggattgtatggttattgctactcagggcatggggtgtttccaaacatctactcttctctgaagaagcgcaatcagttcccttcaatcctttttacttggtaattagcttatccataatccatattcttttttcccctgaaatgtagcgctcatatttttttttattatcagcattgggctgtctaccattttatttgctggtgcagcggtgatgggatacaaaatgtttggtgaagccacacagtctcagtttacactgaacttaccagagaatttagtggtttcaaagattgcagtttggaccacggtaattttcgctgtataaaccatttgaaatttcatttctaaaagaagttaagagacctgaacttttggtttgcttagtgcatggaacaatgatatcatggcatatgcctttcatgccacgataaaacttgcctaagctaatcttattaggatcttttgtctaggatattagtcttttttatctgatttgagcagttctcatattttgattatatcatgctgaacaagtctctcaacttctattgcaggtggcaaatccaataaccaaatatcctttcttatatttggctgggtaattctttgtttttcatgatacttgtcaaactttctatgtccttaacgaataatcacatatgcattaaccataaccccactgactatgagtttggaagag

SEQ ID NO: 6231 - DNA, 440 bp, Zea mays
gagtgtactaattattcgttctgtgtttccaggtcttatttctgatgtaccattattttgctggttctgagatatacaatgcaatccgtgtgttcattgcttgctatgtctggatgactggatttgggaatttatcatattactatatcaagaaagattttagtattgcaagatttgctcaggtgcctatgctacctcatcagtattattttgtgctatgttctaattagtttagtctcctgtatttcttgttaccgccttttaagcactagaccaataactatactttccatgcagatgatgtggaggttaaatttctttgtggcattctgttgcattgggcatatataatagagcatgagatcattgtcaaggatcacttggtctgtttaacacatacaatgaggtaccatcaatcatggctattaagattgcttgct

SEQ ID NO: 6232 - DNA, 543 bp, Zea mays
caaattgtgtcggtgtgtgggttgtggatttgatggtatgatgtgttatgcatcatttactatgatatgtatcgagttgtttctttctgacatggtacttgcataaaatttcagagaaatgagccttatgttgatagtagtgctggatcacacttaaatggaagtataaataggccaattcaatcagatgatagcatgtcatcagtgtttgggaggctatcgatttccagaagcccaggtactgaaagcaggaaacatttttcttatgagatctcattgttatctctgcactctaaaactagatatgtttttgtactttttgaaacagccaatgaaattggatcggatactctgtttggatgctcaatgtctggttcaaaagaaagtcctgtttcaacttctgcatcaatgaggggattgtcaaagccacctggaaaaggggacctccggctctcaagatctatttctacacctcttctttctcctagagttagattgaacccaaatttcattgacagacagaagaatcaggcagctactgct

SEQ ID NO: 6233 - DNA, 634 bp, Zea mays
gcaaacagtacatttcacaaggtttataccacctttgtctgacgtatcttgaattgctaaacgtccatttcagttcccagcaataagaagccctcgatgggcaaggctgcaataattggaatatcaattgggggtgttgtccttattcttggccttgttgcagtagcaacatatgctctacgacagaaaaggatagccaaggaggcagtagagcgaactacaaatcctttcggtaatgtgtaccaaagattaaatactaggaagataactgtacttatcctgattcattcttgttaatgctttggtgccacagcatcatggggagctggtgggacagacaacggagatgcaccacaattgaagggtgcaagatactttccattcgaggaactgaaaaaatgcaccaataatttctcagaaactcaggagatagggtctggaggatatgggaaggtaattcagttgccgctttggcctgttcacagctagacacgtgtttgagaaagcatctaacattacattttactctattaaaaggtgtacaaaggaagacttgcaaacgggcaaatagctgcaataaaacgtgcacagcaagggtccatgcaaggtgcagctgaattcaagaatgagatag

SEQ ID NO: 6234 - DNA, 353 bp, Zea mays
catgtcctgcaacttggtcacatgcgtctgaaatgctgccttctttaattttctttcttgcagcctccgatgatgcactatcaccaaagccacagcggtcacggagcaggcagcataggggtttccacagaaaatccatcagccgttcaatgtcatgtgactcccactccaagacgtctgtttcatcttcctcaagagctcacacggtgcgactttcgcttccttgggttgtggacttgacatcatttggttggaatccaacaatcactttacagtaatctgtgttgatgactttatatctagttttgctcagtcgtattattttcggaccacatgtccacattgcttctgct

SEQ ID NO: 6235 - DNA, 345 bp, Zea mays
atttgcaaacctgtctctgaaacacagtgatcccagttcagggcgcgacgctatctctggcctccgcatttaagatccctttgttccagcttttggatccctgagctttgcagaacctgctgcccctttatgccactctttgtggttgttagtagcatcatgagaggagcagcaccggtgaaccgggaatctcatcccacggtgaataaagctggaaaggttaataactgtggatctggtccttagttctttcagaatgtgcacctggcggtcatcgttagcttctgtccattattgatgcttgaccagtcggaggtgtttaggatctgtttgcagattgatgac

SEQ ID NO: 6236 - DNA, 461 bp, Zea mays
tcacttgcatgtgatgcttcatcgaaggaaacgcacactatcccatctcactctgaagcctgtctgttgtcctactcaaaacaatgtgatcacaaagggcccgtactagtaatacttctggagaatgaaaaggtatctactatctctcgttgccgtatcttccgactaaccacaaaagtaattttttttatgtgtttacagatgtcagtgcaagaaatcccccaaaattggacgatactggacctactgaaaaggtcttcaaactatgggatgccattgaggctgaggctgaactgccatgccgtccacaactggaaccaggagctaaaaatgggcgacgtgcttgaactgatcccttcgaccccatgcaaatccagaggtcgcacgagggagctccaccagaagtttgatcaccgtctcgccgtttcccagtcctgacagccttagaacaccgtaccttg

SEQ ID NO: 6237 - DNA, 497 bp, Zea mays
gcgccatggcggcgcactgcaaggtggccaggaggcacatccaggtcgccagagacagagggtcgaggtacgacttgcagacgggcacctgaagcgccgccaccggtgagtgagtagtgagtgattcacctttttcccagggcggatggtcggtcagtactcagtagttgcaatacctgcaagatgtaccagatggagacgcagatggcgtttcccacgaggtagatgcctcccttgacccagtcgctgttgtcgctggtggtggccgagagaagagccgcgccgaggagcgctgggcccttgaagaacgccatggatgctgctcccgcgaggcagatggcggtgccgacgatcttggccacgctcctcgggctcctcatgtccaccttctctagcctgcgagccggatggatggcgtgccggagtggagccgggtaacaatttgggcagcccaaaacaggaaggaaggaagaaagaaacagtcacctacccgatga

SEQ ID NO: 6238 - DNA, 382 bp, Zea mays
ttaccatggaggcaccgccgagaggctccgatgttttcggatcagcagtgcctgtgttgcgtggtgaagacgatatggttcagagagcggtagaagctcctcttacagccaaggaatcagtccaagaattatctgtatcagacagtgaggatagaacacaggacgacaagtgcaaagatgcggagtctttcaaggagattctgtcactgagcgtcgacatcgctgaatcaagtgacttcccggtgccgggcaatgaaggtattgtggttcagaggggaaatggtgaaacaatttctgtccgaaaatcaggccaagattctcattcaacagagattggggatgaaatggagggccacaaaaccgaagaagagataccactgca

SEQ ID NO: 6239 - DNA, 748 bp, Zea mays
atccagaattgtcgcacctactgtccttttttattaaaatcttcagcaaatgtacaagctgttgttgatgcctcggatgcttgtcgaatatgaaaattttgttctctgatgcaggcccttgattcatttaatgctgaaagtgagtttgagcttaccttgtcagctggtgacattgtaattgtccgaaaggtaacatactttttcgcaagcataggtttttaaatcttcttccatgttgttaatacaattttaatgctttttaaatgcatacctgcaccagataaacacactagcacttagcggtcattaacctaggttgcatttttttatgttcatcgacgttgtgggttctgtaaaatgattaatcatttttgccagcagctccattaagcatgtgtatgatcatttggcctgcatttgtcctctcttttctctgaaacacagatctcaagcaatggttgggcagaaggtgaatgcaagggcaaagcaggatggttccctcatgcttatatcgaaaggcaggaacgtgttctagcaagcaaagttccacatatattttaggagtttctggcagtcgcattacacggttttcatttctattgttgggagctggaactgtatccatgttttcacttcctcttagtttccgcgatgtaattactggctgtcatgtgcatagattaaatttacttccctttttttagtctggaaaaggttttggatgtaacatatttttgagagaccaatg

SEQ ID NO: 6240 - DNA, 456 bp, Zea mays
agtttataaaaaattggtttttccagctctgcattgaactgccaaggcaaaaatagcaagaaaagaataggttggagcaagctggtcacaagcctaattttgtcctgtcccccttgaagggttaatggataagttaacaagttaagcgtgtttaacctgaaagtcttcaatgttttattcttctgcatttttgcgccagatttaggaaactaaaggaggaagaatcaaggagaaaagagattccggggcaagcagaacaatcagaacagtcaagttttgaatctagcgtcgtagatggcgcacaaatttctgatgcgtcttctggagacaaaaatgatgaacaggtagtctctatttttgctacttggtatatggtaaatttcagcaggtaaagtctttttgactgatgataggtattaaacaggagcctcatgaaattggaccgatcgtagctaa

SEQ ID NO: 6241 - DNA, 374 bp, Zea mays
attttgctgtgcttgatctgaaccagtgaaaccttgccaatcgtccaacatgttatttgcattcatggtacccgtatttgctggctcccttgaatgtccaatgaaccatgagtccatgtctgtttctttgtgactggcttttgagacctccatcatgtccccagtttgattcaacgaagtgtcctggacttgaccggtggtagtagaatcttgccaatcgtcaaaagaatcatttttttccttaaccatttctgcagtattttgagccttcacattgcccacatgccatacatcaacaggattaatttctgaagaatgttggtgtgagatgctgctcattgtctcttcatctccaactggtcccaccaaattta

SEQ ID NO: 6242 - DNA, 654 bp, Zea mays
  misc_feature (366)..(367): n is a, c, g, or t
  misc_feature (383)..(384): n is a, c, g, or t
  misc_feature (386)..(388): n is a, c, g, or t
  misc_feature (394)..(399): n is a, c, g, or t
  misc_feature (401)..(401): n is a, c, g, or t
  misc_feature (615)..(616): n is a, c, g, or t
atgttcggcctcgcactgttcgggaacgcctccaactcgtcgaggctggagatcatggccaagggcaccgtgcctcttggcaagatgattggcaacttgatacaggacagagatgggtgaggagggtatgtatacctacatttttcacgtgaagatctgatctccattggatctctgattttggtatcgatgattttcactgtatttacgatttgcaaagatggattcacaaaacacagttagcaacagcagttcaggacctcctgtcagatataggaattgctgctgcaacgctacttcagtatggtgattacagaggtgtatagttgcacttgcacactgagggatgtcgtgagaatctaaaanngtttaaaagacactannannnctgtcnnnnnntnccaacaaaatttgcctgcaaaagagaacggaaacattagcagctgttcattatgctttagagtaagttttaattccctaaaacaactggtgatatatctgcagagcatgtctcagtttaagagaaaaacagtgtccacagaatataaaactttcctatagtatgtttcataggagtacaaaacttacctatcctcaaacaagttcgtaatgtannttccaacgattgcatttactggaagaaccgttaatcca

SEQ ID NO: 6243 - DNA, 406 bp, Zea mays
tactgctactactactatatatcctacacgcatgacgatgactgcatgtatgctagctactaccatatatacaagacaaatttttcatcaactttactaattacatgccatttcgaatctgatctgcagacgcaaacaaatcagtcgaattctacgatttcctccaagtgaacgcgaactcgagcgacaccaagtgtggttcgagcattgaggagcaagaggcggagagccgggatgacgatcaagccgaagggcaggtgcagttcatagatttcctggaggttggggcttcccatcgccgccggtgatttttatctatatatttaactagggatgcatccaaagcaggttgtaatgctttgtgaaagaggcaggcatgctgcaaatagcaatcgtcgtctaacac

SEQ ID NO: 6244 - DNA, 1585 bp, Zea mays
  misc_feature (1575)..(1575): n is a, c, g, or t
agtcgtctcaatcaaacaccatcaaacagaaagttgcagaaattgctgctcagttggaacagtaagattagcttcatttgccttatagtaattatatcgtactttgaccccatatgtaagttgtttagggcatcaacagtctccagcatgataatttgactttttttgggaaaaaatatattattttgaaagagagaaaggtatactatgaaagtatttttcatgatgaacctagtaacgtcatgggttatcaatctatgtaactttttacaaattgatgggtaaagttaaaaagtttgaccaactagaatcctaatgcagcctatatctggaattggagggattgatatattcttttgtttgttttggtgttctttacttacatgtgatcagcaatttcatgcacctgagtgtgaactgggtattatacctcctagtagtattactgttattaatattttttatctctatcttacttgctctttttttatggtgaccagcaattttgttgtctttgcttacatgtcaccctgtttaatttgttgaaatatactcaacactgtaatctgtcaacttgatatgtttggaaaactgtgctatctctctgcttttgccattgcatccctgaaagtgcaaattatccttaatggagtatatttatatattcaagaatttgattcggatagtgggttgcagtataatgtgttcttacatctgagcaacagaatttcttttaacattatctcagtaattttgaaaatggaattcatttgcctttaatttctgtatttcatgaatgacgtactttgcctcaaaatttgtttatgtaaaatcacaaatcctgaagcaagtctggttgctagtggattgcggtggcctgcagatcagcactggctatatgctcttaagttatgaagcttattgatctgcctattatcatgctttgattaatttgctttgtttttgttcttctctatttctctattttctgttcaaattggcatatttacactatcaaacgtgttttttctttgtttaaggtggtagcatggcagctatctggttgttttcatcatctttgtttatgttgttcatgcatacttcatcatagtagtttcagggttacaacctctagtttatgcaaattttaatacttttaggtacccaaaagcaactgagatatttgaagcgatcgctcgtcagtcaatcaacaacaatcttcttaagtatagtgtcagaggaattcttcctaatgctggcatctgtcaactatgtagaggtgatcctattgccatcacaaattcattggagcgataccaggtgtgtattattctgccataagatcctaaccggttaatatgtgcctctttgtctttataaagatgttttgttattattttgcaggaaattgacccgactttctctgggacacgtgaatacaagcttttagctgtatgaataattatttgccctttttccttggcacttttcattgcatgcctgactaaaatcaatcacccagtcatgagctattttcatttcaggatcttgctgcatctatggatgaaggggatncccaaatcac

SEQ ID NO: 6245 - DNA, 453 bp, Zea mays
ttgggtctgttcattctgctttcaacgcaaccagttccctcaacactactcttcgatctcagaaaataatctccctgcggaactctttcctcagtacaccaccgtcgagtacatatcttcaactgaaactggtcctatagttccaccggttttcatttttgttgtagatacttgcatgattgaagaagaaattggttatttgaagtctgcactggcacaagctgttgagctattgccagataattctcttgttggattcattacgttcgggacgtatgtgcaggtaaaagcccattgttttctttctaatgctccatataattgttctttttgatatgaaattggttagtttagtagcatgtaccatctgcatgttcaggttcatgaattgggttttggcttattgccaaaatcatatgtattcaaaggaacaaaggaggtcaccaaggagca

SEQ ID NO: 6246 - DNA, 370 bp, Zea mays
ttatatttacgttaaaggaacaaatagcagttcactagatacacttatttgttttttttaaggaatgtaacagttcatgagttccttttaaatgatctggtttcaggggcacaagcagtggttggctgaagtccagttcctgggtgttcttgagcacccgaacctcgtaaagctgataggctactgcgccgtggattcagaagccagcaagcacaggctgctggtctacgagttcatgcccaacaagagcttggacgaccacctgttcaaccgagctcaccctccgctttcatggagactgaggctgcagatcatgctgggcgctgcgcggggcctggattacctccatgaaggagtgccagaagttcag

SEQ ID NO: 6247 - DNA, 384 bp, Zea mays
tcgtgaattctttgtgacagtgggatgagacatttaagcaagttcttcaatgagcagtatttggctgatcatggattgacaccaacagctactggtctggaatttcttgataaatgagcatttcacagggacttttcaatttcaggaagttggcatcctccctgtgactgcgatgataccttgacacaagggtgaacgctgaataggtcaaagcatgaatatatgccatacaaatggtgaacctgatgtgttttaagtactaattgtagtctagtataggcattgccattggataggattgggatagccagtgttttgatccttgttttgatatatatctattgaggctcaggctgttaccagttagaatgctgcactgagcaa

SEQ ID NO: 6248 - DNA, 631 bp, Zea mays
tttttgattcgtcctcccgccgatccgctgcggctgcggccgctccacggtgaggcggcgtacggccgcggttttgcttcctgcggcacacggccggcgcctgggtgaaaagtgaaaacggacgtgtcgtcagttttccgccggatctggaatgacctcgtgatagcggcgactgttaataccaaaagggcgcaagtttgttacggaaagggaatcggtttcccgttctggtcggttctatccctagtgacgtgatgcccagcccacccctcgtcgcggctcgcgctcacgagacagtgttccaggggtgacgttcgccaacgccaagccgattcaaaacgcacccccggcccggaaagaaacggcgccgctgcgcttttcacatgatgacgatggaggcatggacggacggaacggaaggcaagaaggctttccccggcgccacgcatgccatgccaacacattgatcggcggcgcggcgcatccagggcatttggcagtacggcggcgacgccgggcggtccactggtccattcagccgacgatagtttcgtcccacgggcttaatccgatggcgacgcgcgcggcgtgtggaaccctgttaattcggccattccactattattgctag

SEQ ID NO: 6249 - DNA, 391 bp, Zea mays
ggagtggtgaggagatggatttggagaagccggattttggcaaagaagacgaattgcttgggcttcctaagggctgggctagtgaccattcaaaagaagagtctactgccactgatgcgaaaggtgaaaaagggaagatctctctcaaagacaaggtggagcttgagaaagagatggaagagtactacaagttagactacgaggacactattggagatatcaagactcggttcaagtataaacaagttaagcccaatagttttggtctgagtacctatgatatattggcatcagatgacaaggatttgaaccagtatgtttccgttaagaagctagctccttacagagaggatgaatggaaggttacacatcataagaagcagagcaagga

SEQ ID NO: 6250 - DNA, 368 bp, Zea mays
tgtgccgacaacgtcagaggtaccaaattcaggtacaaaaatgcttcatgtgtgttcagctatacaaaattcccagttatcagcacttggaaccttgttcggcacaaagagaacctacctcggaagaaacgaactgtcggactgtattctgtgtaccaatgaaaaccacctatgctttcatcatttcatcctcgaattggaatgagctttggtaccaagaccaataccctagtccttttaccatttgtattgtagccatgctacgcaagtcgctaacttgaagaatcagcagacattttccaaggtaataaatcgcctataccactgccacaaaaatgaacagcagtaaacggcagaggaacacaaga

SEQ ID NO: 6251 - DNA, 376 bp, Zea mays
gagcgggatccgaaacgtcggcctaccatgggaaatgtccttgagatgctaagtagctagagtgacaggcaccgatttgaggtgttctcggttaggagtggattgaagcggattagagataatcaaatctcttgctagtcaaaactgaatagaaatgggtttactttccctcaatcccctcctacctatgcaaccaaacaaggccttatgggtttcaacaatttggtttgatgtattgtcacaaattgatcatttgtaacattcaagatttatgcgcaaatgtattggcgtgtggattagagagtttctatcttataggctggctcttgaatgatatggcaaacataagctagcaaaccagttcaactactgaggg

SEQ ID NO: 6252 - DNA, 461 bp, Zea mays
gacgacaatgattcaagcatcttcggttacatagagacgccactccctgaaggaacgaattacacgcaagaacaggcgaacagctaaggatctgaacaattctccacgtcttgagttcaaaaaaaatttcagcagagtgttgaaggaacaaagctgttcgatctagcagtagcagtgacggtcagatggttcagtagatgtgcatttagtcgtcgtccacttcatgaaaaggcagtggaaccgtcttcaccgcacggaacttgccagcgttgttcagatgctcattctccagcctgaaattttcagtgcttggttcagtctctggctcgatgggtttgctgttcaagaacgggaccgtgcagagctgtagtattaattataggggttttttttacctatagaagttccaatgccctcgccggatcacctcgagggccgctaggaagaaggaagtgacccta

SEQ ID NO: 6253 - DNA, 380 bp, Zea mays
ctactcggctttccgaaggatcacacgagaggtatcagcaggacagagaggtatcgatctctaggaaattcatttcaggtcgatactgttgcttaccatctctcagttctgaaggatctgttcccacaaggcatgaatgtgctgtctttattctctggtattggaggagcagaggtggctctccacaggcttggcatacggatgaacacggttatttcagtggagaagtccgaggtcaaccggacgattctgaagagttggtgggatcagacgcagacgggtactctgattgagatcactgatgtgcagacactgtcatctgagaggatcgaggcgtatattagaagaattgggggcttcgatcttgtgattggtggaag

SEQ ID NO: 6254 - DNA, 579 bp, Zea mays
gatcaggctcggagacgaataccctccaaaggctgtagccaaggtaaatatatcatattaccaagttaaggaactagacttattcccatgtaaacctgaaagtagagtttcacaacataacacttaactgatcctgctccgaaaagcactgcagaagttttgataatatgtggcttggatggacaaaagatcaccacaaatctagcatttaaactgtgttttgtttttgtgcaccagatggctgctgtggccgccctctgcgtgcaatacgagggtgaattccgtcccaacatgagcatcgtcgtcaaggctctgaaccccttgctgcacagccggtctggcaaccgccctactgcctcgtcggcctcccacgctgccgcagcagcagagcgatccggactgtgatttcccatcgctgcgacaactttgggttcacgaaaaaggaccgtcttgtggagcgttggtgttgctgtgtcgtgactgccaacgccttggcgcagagaagagctttgccatgcagctgtgtattgtaaattgttttgtaagcgatgcgcctcctggtttgtgtgccctgtcatc

SEQ ID NO: 6255 - DNA, 380 bp, Zea mays
gaggcgtccaacctcgctagaccggtctttcggaacaagccgtagcgaccatcttcgatgattgggtcaactgcacgtgctgggtcataccttgtttggtgtgttaaagatgggccggcaacaggaggaagctcccaatatatatccagcacagattccacgagcctgctgttctgaaaatgctctttgtatgagatggccatattgctatggttgaaattgtccctcatgtaacctttaacaccccaccatgcatcatcctttccgcatagatcagctatctccacagccttctcccagaacttcttccgttcgaatcttagtcttgcctcatcgctctcccaaaagcagctatgtccaccacctctgatgtatgattg

SEQ ID NO: 6256 - DNA, 804 bp, Zea mays
  misc_feature (793)..(793): n is a, c, g, or t
  misc_feature (795)..(797): n is a, c, g, or t
aatacacaatatctctaaacattgaattgagcaacatccttttgtgttcaatccagtgttgtcataaaaggctgtgtagtccgtacatgccgtttaaacactacacactgactagctatgtccatttgattggctgtttatcccgtttatttgaccatgtagcctgaataaatgttaaatgataggcgcccatctgtttaccatttagcgttcttgtgaacattggctcaatgataatcttatgctatgttgatgctatgtattttacaaattctcttggaatcatgaatgttttactggtgtatatctttggttatatgtatgtttgctcttgttgagtaggagctatgtcttttttgttttgttgctggaggttatgaaaacataaaactgtctattgctcttacacaagatctaacattgatcccagggccccagctcaggagagcaaccttcgtcgactacagtctctgcagcaagtgatgtgaagactggggctgggccaacagagtcagcgtctgcaaacgtgtctaccgacaagaacaggaactacgctgtcctggcaggcacaattgctgctctgagtggcctgggttggtatctattgtcaaagcctaagaagtcggaggaggttgtggactgaagagggggttacgaatgcgagctgtggatggttggccttatatttcaccatggtttactttctgcgcacaccttctggaaataattgttgaaacatacgctgcagtctgcattacttgttctgaggcctgttgcaacaccgaacattgangnnngtactcg

SEQ ID NO: 6257 - DNA, 381 bp, Zea mays
ggagcaaagagcatcttctctgcagttcacttctccttacttctaattctagaccacgcaatatactatgcgctttttacagggtgggaaaggttggagaatatactactgtactacatagtgtgcaatctatgttatatgtatagaagacgtgccacttctctgagctggcaatgccattcaaggaactcttgtgctcttttgcctcttctcttctagctgtgatgcctcgttcagcatgtccacggcgtcactctgcatgtttagcttggatagtgcaactgcctgcatgtagaatgctgttggccaatcagggtagacgatctgcgcttgcattgcatcacggagggccgcatcaggttggtcacacataaggtagca

SEQ ID NO: 6258 - DNA, 381 bp, Zea mays
  misc_feature (369)..(376): n is a, c, g, or t
tgatgaggcctgtttgtttttgtgaacgggtgttttatgatgggcattgttgcttgcctgtaagcaggggaaaagatatgtaactttgtattcatgtagcctgtacccgctatggtcactacgtactgggatagcttaaggctaagttcttaacacagtttataaccatgcatgtgatcgatctatcagagattgaatagctcgaatatggtattgctgacatgttgcacccccaaagtcatcgaacttctttgttgaatttgggatggacagtggatatcacaaaaaatatacatccagttcatccaaagtgcaggtaactgttttattcagacatatatgattaatcatcattcatcaatatgtgannnnnnnnttgag

SEQ ID NO: 6259 - DNA, 380 bp, Zea mays
cgctgcttctaatcacgatcgcagtcctggttgccgccattattgttacatggatttggtccgagaaaaaggagttgagagacaagtggaggtgagcgaggtctcagtgttctgacgctgaggaaattttgggccctagtcagctaccttctcctccccccttttcattgtagtgctagagttcgtttcacttttgactaggactttatttatgtaaccgtttgacaacaaagcctatctgccgtgaattgacacactgcggaggccttatagaaagccacatacgcaattaaagattcaggaaatgacatcgaagggttagcagagtgcagatggcgtgaatgggggttgcctataacgtgtaatctgtaccactgcag

SEQ ID NO: 6260 - DNA, 897 bp, Zea mays
  misc_feature (29)..(31): n is a, c, g, or t
aggttattctcacccttgtatagaccctnnnaggtacctccaggggctttcattctgatcgtttgctagaatagcttcaattgtgtagtctacttctgaatcacgcattgccgcaaggccaccaagaaatggtgatcttgttataacaaagtatctctgttggagaaaaagttaaagatacttcagtgcaagcttaatagctgatccctatcagtcagcagaaaaaaaaacacttaggaagcagcacaggacacagcaggatgtaacaggcaatatgaatgtcaagaatagtcatacaatcaactttgcccagctttgacagatatgtactacctatgttggttacatagacatgatcttatatacatttttttacaaataacagagaaaatgtttacataggcgattgtaatttctataatgccgtagactttaaaatacaggaagtaaatcagaatgcatacagttatccatactaattgtatgaaattaacatgggatgatctgcaaactaaaataatgaagcaatgcaagttaaaatgcataaaaactggaaaattttctcaaacatgatgggaaaacaagaaaattttaaggcgcaaataatagagcatgacctgattccaagctgaattattgaagacgtcttccttaagtaagtggtcacagtattctaattcagtctcccatccccccaacgcttgaagaacccactataacaattgaattaagcaatcccgttagtagaagaaagattttactgatactcagtttagcttagtacccaaatttggaaacttagaatacagaaaatgggtacgcatacctgcctatgagaccaagcatgataattttttgcatcaatagcaagtatcttcattgtgaattcatgctctt

SEQ ID NO: 6261 - DNA, 365 bp, Zea mays
actgctctgctgctactatcctagtcctagtatactagtatattatacagtcctctctgtgaaatttgaatcgactcgaaaaccaaaccccaccaatatgagcttgttaatatttgtcctcccgaatcaaccagcgcttgttaataatggctgatgatgcatgcttctactatcctgcctgcactctgcaatcactttgaacttgaattttcatgtgtagtgtagtgagtagtgcagatttgtatatagatgtggcttgttgctgcttgctgcgtagtaagtaaagtaatccattcactgggaatgatcttccgatggtgttcatgaaaatagcaccatctgtactttctatccagcggtgctta

SEQ ID NO: 6262 - DNA, 374 bp, Zea mays
agtatccaaccaagttaatcactataacccttttattgcctatggatcgctagacgagacatgggaacccaatctctctctcgctactactgtggatgccgcttctatagcacccatctgtcctgtcgaaaagacagatagttttagtgatcttgtcaacaggccactggaaggatttgatcctattgaactagacgaagctataattgaagagaacaggtcagattcagttgaagaaagctcgagcacattggacgtccaagcatctgaacaacgcgatgatcagagagagagtctcactaataatgacgtgaaaactgatgcagcacatgaaacgggcactgctatatctctatccaccagcaatggagaga

SEQ ID NO: 6263 - DNA, 769 bp, Zea mays
atgagggctgctttcgagaaatggtttgtgaagtacaaggttgacttggtgtttgcagggcacgttcatgcttatgagagatcagtaagttcttcccttcagcgaagtctccttccatttgtatttttttcttcttcttcacatggtagaaaagttctgagtttagtctgggctgtgaatctgttccttcagagttgaatcagatatctggatgtagttgtatttctcatcgatgtcctacacttgcagtaccgcatttctaatgtcaactacaacataacgtcgggaaatcggtatccagtgccggacaaatctgctcccgtttacataacggtcggtgatggaggcaaccaggaaggacttgcttcaaggtgagaggaactaatagccagcaaaatgttttactggtgctattatgtttactgaactcatactcatacactcacgtggcctactagacagaaacttatggttgaggtcaggtcatggtttcaacttccaagtctcgtctcaacttagcatcagagatagatagtttccccttcgcattattgtcttcattcttttcccgaagtcttacagcatttgcgctcctttgcctgttgggctaacccaccatcttgcaggttttataacccccagccggattactcagcgttcagggaggccagctatggtcactcagttttacagctgaaaaacaggacccatgctatctaccagtggaatagaaacgatgatgggaatcctgttccagcagacaccgtaa

SEQ ID NO: 6264 - DNA, 404 bp, Zea mays
agaaggtcacgcactgacagattgttagaaacattatctaatgtgatagtaaacatcttctcttttatcccccactctttgagacactctgtaattccttctttgattgctaggcctgtatgtggatatttcaaatatttgaacgcaataatcttttttttcaagataaagtctgcattaatgtagtgggctgtcaagcaaagataacccaacttctgatttgaggtccaaagattagttgtcaagcaaatccgagagttaagactttgtagctcatttcttagctcttgcctcatcatcttgaatctggtaatacaatcattttgcattgtttgacgcccaacaccgctgaatgatggctgcattgactccatccactgagcaaagaaaggatgtcaaacttg

SEQ ID NO: 6265 - DNA, 1094 bp, Zea mays
  misc_feature (1031)..(1036): n is a, c, g, or t
gggagtgcctcagctggtacaagttctacagctgctcctcctgagaaatgtacaattgagattgctccatctgcccgtacttcatgtagacgatgcagtgaaaagattacaaaaggatcggtaagtatattttgattaatattttttatgtcatcacttttttttgtgaatgttcattgttattaagtattttttgattaataaattgtttttttgttgctagatgtcattaagtatttctttatagtatgttcataaacaaactctcctctttaggctttagtgagcagtcttaagtgtaatttatatgtaggcaggaatgataccaattggatttttaatcgaaagcaattgcattgaatttacattcttacgtgtgtatgtgtatatatataactactcccatgtgtatatcacacacacacacatgctattcgttaccctatgtgaagcttcacccagccggagccggtaattaccgagcgatattcagtaattatcggtaatgactgagcgatattcagttattattagaaattactgagtgttcttcaataattaccggctgggtgaagcttcacctaggatgccgaatagcgctatatatatttatttggtggtggtagtgggtatcataatttttaaacttcgatccatgcaatattggttctcaactctcaataattgcatatttaatatttaattccattaatgctgagaaagtatgctgtaaaacattgccttttgacttgactcaatttttgtcaataacagttttatatgcttgactaggtccgtctttcagctaagcttgagagtgaaggtcccaagggtataccatggtatcatgccaactgtttctttgaggtatccccgtctgcaactgttgagaagttctcaggctgggatactttgtccgatgaggataagagaaccatgctcgatcttgttaaaaaagatgttggcaacaatggtaagaaaatcatggaaataagataaccccacttaactttttttactcagtaatcttnnnnnnttttttttgctcatcaagaacaaaataagggttccaagcgcaagaaaaggaaaagata

SEQ ID NO: 6266 - DNA, 450 bp, Zea mays
tgctgtgtacttccaggtgaactttctagttgatatcatcaacaacatttcttttcgtttgagttgcagtgttctaaacaaaaatttaacttgctgtagctaaaatcgagattctgggataaggaccctgggcgtaaccgtgttccttatttcctctgtggatcattatcagaggatggagaaaatattaagattggcagcaggctgcaaacgtctccattaccaaatgtgcctgtggggaccaaaaagggttcaaaaccatcccaaagtatagttcaggcgcttgctacaagcgatgtcactagcctgctgacatatcagctcaactcccccagaggaaacaatgatgccgtaaatctagaagctcatgatgatcaaggtgatggacgcagcaaagagcaaggagcaggtgctgtaaatcaagaacttgatggtgaacaagatgatgga

SEQ ID NO: 6267 - DNA, 411 bp, Zea mays
tttttgtttcctttttgaatgatgtttttaaggttctatgttgtgattgaacataaagtaatttttattgttgttttcagggatgcaaaaattttactttctgccacatatgaggatgtctctgtggagaaacttaatttggacaagatcaccatatatgttgaacatccagaaccatatgatccacctgctgagcctgcaccaccgccgccccagccactgaagttgactaagaaggagcagaagaagttgagaacacaaaggcgtcttgctaaggaaaaagataggcaagaaatgattaggcaaggcctcttggagccacctaagcccaaggtcaaaatgagcaatcttatgaaagtgctaggctctgaagctgtccaagatcccacacggatggagatggaaataaga

SEQ ID NO: 6268 - DNA, 291 bp, Zea mays
gtcctcttctttttcattaaagttatacatgaacactcccataatcccctctgctacattttatctatgtaataagttatttattgtttacagtgctgcatgcattaatcttgaagaataccaaactgcaaaggctgctcttgagttaggttcttcctatgcaccaggcgattcaaggtttacccgtctattgaaggaatgtgatgagcgcattgctggtgagcaaaattaacttcagaagttagtatataatacaacagtatgtgtgggggtatgtggtgtgtgtgtgga

SEQ ID NO: 6269 - DNA, 474 bp, Zea mays
tatttacacacattgtccacgattgcagcactcactcatttgttggttgctaatttgctgttgctgcatgcagtggatcttctgggtgggcccgttcatcggcgcggcgatcgcagcgctataccaccagatcgtcctccgcgccagcgccagggggtacggctccttccggagcaacgcctaggaccatctccttccgggctattcagctcttcctcctccgcagtttaaggtgaacggagaaggagagcgcgagggggtacggctccttccggagcaacgcctaggctcacctcgcctttgcccccgcccatccacagcagcagtagctttcattcaggtcaagagtgttgcagctgccggcaacggtagctagcgcaggcgtttgtgagtttgtgtgcggtgtggaaagcaagtgtgacttggtcagcgtctgtgtgtcctgttgggttgcagtcaatctaactaaaaaaa

SEQ ID NO: 6270 - DNA, 383 bp, Zea mays
gcctcggccgtcttcctggacgagatgaggccgagggagttcacgtcctggttgtgctgctccgcgctctggacgtggttggtcacggggttggccaggaactggagctcggagcagtaggaggccatggcgatctcggcgcccttgaagccgtagtccaggctcgggttgcgccctccggacaggttggacggcaggccattgttgtagaagtcgttcacgagctccgagaactgcgcgaacatgagcttgccgatcgccgcgacggcgagcctggtgttgtccatggacacgccgatgggcgtgccctggaagttgccgccgtggagcgccttgccacgggacacgtcgatgagcgggttgtcgttgacggagttgatctc

SEQ ID NO: 6271 - DNA, 371 bp, Zea mays
tctcatgcggaggccttccgtgccttcttggaggcaggggacttcacggtcttcggcttggccttggccttggcggcgggggacttcttcggcttcgccacgaccttcttctcgggcactttgcgcttggtcccagcagcagcggccttctttggcttggcagccgctgccttctttgacttggcggcggcggccttggccggcttgggggcggtggtcttggcagcggcggcctttgccggcttagccttggtcttgggggatgccttcttggcggcgtccgagagcttgtacgaagccttgaccttcacgagcttgcccttggctgcggacccacggagctggatggaaagcatcttcttggaagttgg

SEQ ID NO: 6272 - DNA, 504 bp, Zea mays
ttggtgccaccaaacatgcgctccatgcaagggaagcttgatattgtgaagctttgcagccagataaagggaaccagcagctatgtactggggtttatactgtagacacaatgttgttttaagcctgaatataagtagcagaattaatacatccgatttgcaatattaaaaatattggcattgataaatattgaaatagcttatcatataccagtcattcacaaagttccatgctacttgtttcacttctttttgattgatgccaagattttgcatggcatcaagaagtggtctataaggatgctgaatgttgaaatcaaatcgaatagttgtaagaagcaatctctctccgatcaaaatgagcgctttctgcttctcaaaaacatcctgtataatatatgctgatcaaacactggatgggcaacaacataaaagtttgaaacattaatttagtggtaccttctgacggatcctttgagccgcagcagggtcccgcctatactg

SEQ ID NO: 6273 - DNA, 948 bp, Zea mays
  misc_feature (895)..(895): n is a, c, g, or t
  misc_feature (897)..(898): n is a, c, g, or t
  misc_feature (910)..(911): n is a, c, g, or t
  misc_feature (920)..(921): n is a, c, g, or t
  misc_feature (928)..(930): n is a, c, g, or t
  misc_feature (939)..(941): n is a, c, g, or t
cgagcagctgagtttcgtttcaatggggctacgagatgccagttgatgtgttagcaaaatggtattcagccttttcttgttcaggctcccaatttgttaatggtgctttgtgcatataactaagcagtaccaagctatatacattacttacctgatttttatgtttcaggattgctgacaaagctcaagtttacacgcagcatgcatacatgagaccccttggagtaggttagtatcatcacacaataaagtttggcattccattaagcttctgtcattttactgtgatgtagtgttgagttagcctatggcttattgccaccatgttcttcttcggtatcattcttcagttgctatggtcttgggctacgatgaagagaaaaatgcccaactattcaagtgcgaccctgctggtcacttctttggacataaggtatatgcctattttgttctgctccacatgccacctctacccttgatgaatttctgctgaatctctagtttctttgtctctgctgaataatcctatttgttgagaattaaataatttatggatattttttcaggcaactagtgccgggctcaaggagcaggaagcaataaattttctggagaagaaaatgaaggatgacccgaaattcacctatgacgaaactgtgcaggtaatggtgcatgtcttttgcttcaaccaggcacaaggctcgacttgtttacaatgttacaccgctgcaccaggctagtaagcgaaaaatatgttgtcaatatggttagttgttcattggctttgttgcatattaagctgttaatgcagctaagtaatgtaactgtgccatagtttctgcagctacattcacttctctattcgcaaaaacacatagaagtcgtggtattactnannaacttctgcccnntgttttcanngattgcnnntatctgcgnnngcaatca

SEQ ID NO: 6274 - DNA, 711 bp, Zea mays
ttttggtccaagtcaacactagtggagaagaatgtaagtactctcatttcctttcttaagactagtgtgaacttggtctttagtcttggatatgcatttggaagctgtaggctgatccgcgagcatgctgggaggtcatgtatgtatgtagttctgaatactatttttttttcttgcagcgaaatttggagtagatccctcaggatgcatggaactagcaaagcatgtcaaactgaactgcccgaaccttgtgttctctggtctgatgacaattgggatgcttgattactcctcaacccctgagaatttcaaggtaaaaatatagtatattctgggatgcagaaattgtgtacgagtggcaatatggcatgcatatgtgcgcttatgtctgttaaattcataggcgctggctaactgccgggaagaggtgtgcaaggagcttggaatacccgaagagcagtgcgaattgtctatgggcatgtcggctgattttgaacaagcggtaagagaaatactgtgatccgtgagtgaagaaacatggtaggctgatagctgcattaataccaatatatgtttgtgcctgcagattgaaatgggaagcacaaatgtaagagttgggtcaaccatatttggtgcaagagaatacccaaagaagaactagggtgtttaactatatttggtgcccaaagaactagggtgcttatgcattcc

SEQ ID NO: 6275 - DNA, 398 bp, Zea mays
  misc_feature (389)..(390): n is a, c, g, or t
actcgtccaccatctccccgaactcggcaggcgtcatcgccggcgctgagtccccctcaccgtccgccgcctcctcctggacgtacttcttgcccagaactatgcgcgagatcacgccgagcgtcaacatctgcaggtagtccctgagccgcacggtgcgcccagccgcttggcgcagctgtcgcagcatcacgcgcacctcctcgtcgcggatgtgctcgaaggactcgagccgcgtggcgctgaagagctcggtggcgcagatcctgcgtgcctggcgcaggcacggcccggaaggagcccatagaaggtcggagaagtcgtacgcgatgtacttgccgactgcgaacctcggccggtcggagaacgccgcgtcattggtcttgagnnaagagctt

SEQ ID NO: 6276 - DNA, 678 bp, Zea mays
gtgcttgagcaggtactcaaacactgtgtcttactggcccactttttttacttatgctattatcaaacattacaaatatccctacactatcatgcttgcaacaaatataaatatgacactaatacgagtttctgttgaaataatcagtatgtgagatttgtcaagcctgcatttgatgcttttgtcctgccttcgaagaaatatgctgatgtgatcataccaagagggggagataaccttgttgcaattgatctaattgtgcaacatatcaacacaaaacttggccagcataacttgtgcaaagcctacccaaatgtctttgtagttcacacaactttccaggtaccttcaacactaagctttacattacaatgaccttagatttgcacactcctgatttttttgattgattcatctgaacagataagaggaatgcatactctaattcgtgacaagaacattactacacctgactttgttttctactcagataggctgattcgtctggtaccactcttagttcttctgacctccaataacttattagaaccttaccagtttgagagctgttaattgtggtttacttataccaatgcatttgttgtacataaaatgtcttccaggtggttgagcatggtcttgggcatttgccatttacagagaagcaggtggttacac

SEQ ID NO: 6277 - DNA, 658 bp, Zea mays
tgaggtatatgatctgagagcaaaaaaggatcctccattttgcaaggaagagcagaacaaagctagtgcatggtgagttggatcatgtatacttgggctacatcactatgctaggtccacgattactccaatgttttcccagataattcacttttggttcatacaccaataggttgaccttgcctttttaggtatactaatatcaaacattgcctgcacaaagcacctgttggtatcgaagaaagaggcagtgactggcctgaggagtggcccaagaggctcgagagtttccctgagtggcttggggaaacagaaacaagggtggcttctgatcataaccattggaaggctgttgttgagaaatcttatctggatggattgggcattgactggtcaaatatccgtaacataatggatatgagggctgtatatggagggtataataaatctcattttctaattctgaatactaaataggatttctctcaaaaaccggcattgtactttataatacatgtttttaaaatgttaaagtaaatgtattgaaacagatgatgattgttttcttgcagatttgcagctgcactggcatctaaaaaggtttgggtcatgaatgttgttcctgtgcatgctgcagacaccctacccataatctacg

SEQ ID NO: 6278 - DNA, 359 bp, Zea mays
cagagtcctcttctgtagagccctttgtccatcctcatttcccagaactaaaaatcccaaaccttttaggcgagtcggtattaccaggattaccatccaacttcctctgctcagatgatccagatttctgagtactactgaagatcccaaaactcttgcttgctcgattaggatcaccgccacctgctggttgcctttggttgttatttagtggaaaagaacttctcctttcgttccttggatcttgttgtgataatccaccttggttgaacctcggtaacggctggttatgctgctgttcaagaggtctctggttctcataacgacctccattttcattccttctatcaccttgaggg

SEQ ID NO: 6279 - DNA, 370 bp, Zea mays
ctggctcaaggcacgcgccaccgctacagccgcgggcgcgcaccacggcgagcagtagtttgggcacgcctcctgcgtgcgtgcgtgccatggccaggcttgccttcaacttcaaccgcgcgtggtccattcaccatcccagattctatcctaggttccttccagctactacggagtattcgagtacggatccagcaataaacttgtgctgtctgctgattacagaatttgtttttgctccaatactacgagatctcgtctgatggtcccgatccgccatctgcaaccgctccagatgcctccatgcctgccgatgatgaatcttgcaactttcattcattaattaacgaatcagatatattatttctgc

SEQ ID NO: 6280 - DNA, 421 bp, Zea mays
ggcatcgtagaagagaatggttctcccttccaaaaagcaaaacaaaagaaactcgtatagtcgatcgacgaccatgcatcacatttccttttcctcgatcttctcttatttccgcagaaaaacaacgaaggaaacccaaccaaggaaacgcatgctattgcttaagcatcgccggaggagctggtcgatcgctcgctcactcacgggcctgattgttccggtcacctgtcgtcgtcgtcgagctgagacacgctcctccagaagcccgtgccgtagaacctggcccacacctccttctcaagctcccccgtctcctccagctgcaaggcgggcttcaccggcagcgccaccgcctcgacggcgctggcgtccaccttgacgacgacgccggcgttgtccaccgggagctcgtagatctcca

SEQ ID NO: 6281 - DNA, 317 bp, Zea mays
ccgcgactcgaggcaaccctgcgcatggcccaacagtgccaaccaagcacatcggtcacaggtcagtcagccgcgggagaaggcgcgacggtcgatatggccaaaagtgggccggcagtaatggcggcggcaggcgagcggaagcagcagtcaaatcgtctgcaggctcacgtcccctcctggagcagcaggggagccctctcccacggcgtgaagacgacgcgcccgtgttccgttcctcgaacggctcgcgcaacggctgccccgcgaaccactcgtcccgtcgcattaactccgcggcagggcaggcgacacct

SEQ ID NO: 6282 - DNA, 580 bp, Zea mays
aaccttgatgttgctgatgttgagctgctgaaagagcagtatgcgtgttgcacagaagattatttaacttttgaaggtatagaaagctcttgccaaccagaaaagcacactcttcctgatgggcaggtaggttattattcattttctgccgtaaatcttctgtcaaacatacaagttggtcctctcttattgtgtgtctacataaatgcatggttattgtgtccttgcctcttttcttgcttttgggtccaaatacagtaacgaatctatacaaactagtcttttataaccgcttcttctccaggttataacaattgaaaaagaggggtacattgttggtgaagctttatttcaaccacgtatattgggcttggaagattatggtatcgttcaccagctagttactagtgtctcaaatgtttcatcagagtaccatcgtcagctgcttgaaaataccatgttatgtggtggcacctcatcaatgactggttagttattgatttcatatgccagatgccttttgttctttatgtgcacctttgttttattcaacattgtgagctagctatatatcaaatgc

SEQ ID NO: 6283 - DNA, 588 bp, Zea mays
ctcgtgttcctcgtctggttccttgctgtcctcctgctcgtcctcctccgcccaaccgaagccagccacgggggtggaggaaggaggcggcgtccgcgccttctccacgatcttcatgatctcctccacggactggacggagtaggtcggggcgctgttgtctttcttgtagtacatggcctgcgcagcctccgtgagctctctgggcaggttcttcaggaaccaggggtggttcctgatctccctgatcgttattctctgcatgggtttggagatgcaatgcaatgaaaccaacctcgtaccaaataagaaccgcttaaagttaagatgatcctgagtttacatgtatgggttacctttgcagagtttgcaacaaagatccttgaaagcagctccttgcagtcttgcgacacgtgcacatactctggtattttgtattggattgacatgatcctctacgaaaaagaaaaaggatatacaccaagaaaaacattataagagataagaacctggggttttagatagctttattatattacgggaagaagagaagctctgaagttgttaccccgatcgtctttctgaaat

SEQ ID NO: 6284 - DNA, 365 bp, Zea mays
cagctcaagcctcctgcaagacccaagctctattcagggctcatgccccaagaggatttggatccgtaccgtgatctaataccaggcttgcctgaagacttggcgaagatatgtcttgcccttgtccctcgtgctcattttcctgccatgggcgcagtttccaagaggtggatgtcgttcctcgaaagcaaggagctcgtagctgtgaggaaggaggttgggaaacttgaggagtgggtgtatgtcctggttccagatgctggggcgaaggggtcgcactgggagattttagagtgttcggggcaaaagcagagccctcttccacgcatgcctggactaaccaaagcggggtttggtgtggttgt

SEQ ID NO: 6285 - DNA, 684 bp, Zea mays
acttggtcaaggggggtcacgcaagtaccatctgacatgtaactggctcagatactttaagaatgatagagataggcgggatttgattacttgtggctctgctgctggagttgcagcagcattccgtgcgcctgttggtggtgtgctctttgctcttgaagaagcagcatcatggtaggaactatttccctttgtcgcgattgttaattcatatttaaaaggtgctgccatcttgccatatgcggtgcctttggatttgtaataaccttgttaccaacctgaaaatgcagacctgcatcacaattgtagtaggcatatcatgacttccaaatatcaatcaagtgataggtcttttggataagaaccatagtttgattgcttcagtatgctgataggagaatttatctatttgcaactgcatcagatgggtgatgctgacattttgtttttgctgcattttctttccatttgactgaatgggtctctacttcatgtttcaggtggcgaagtgctctcctgtggagaacattctttacaactgctgttgttgctgttgtactgaggggtctgatccagttctgtcgtagcggaaaatgtggtctttttggtcagggagggttgattatgtttgatcttagctcaaccgtaccgagttacagtacccaggatatcattgcaattatt

SEQ ID NO: 6286 - DNA, 805 bp, Zea mays
ttgaggatccacacagtatgcagcctatccttcatcttttcccacctcctctcgtttgctccagtggtcaatgtgtaaaatttgcctgcagcatcccactcacaattagtagaaaacattagatggcagtgaccagtgacggcatttggacagtttttccagttacgacaaggttcagggtagtacaatatatcacatcttactgacggagacgatcacgggtggtagatcataccatttgcaattacaatagcaccaagtgcatgtctggtgtagtttggagcctgagctgtgaactcaaaagtgtagtaagccctcccatcaacatcattctgcatcagaaaacacatcttgtaattttaacaacataagtaccaaaatatatctttcaagaacagaatagcatggccaatgttccctttctaagtacacaatgttccgcaaataacaaaaactgatcctaatatacaaatgggagaactactagctaatttatggtggtatctatatgttttatctgtcatattgccgcctgtactttcaagttggtaactggctacgtaatcttttattagctcagcataccagctgaaacttggaaaccaggcaacaaatttcaatacatgttgtaggtggaaaccattcattagtacatttgctattttcagagagtagctgttcagcttactgctcaacctaaataaaatggactcagagagattcgtcaatcagcaccaactaagctcattccgtcttttataattctgtccacgtaaaccaatcggcatgcgtgaatgaacttatt

SEQ ID NO: 6287 - DNA, 390 bp, Zea mays
cgaggtcacccggcgcggcgacaacctcgagttctccgtcggcatcgtctccgcggacttcgggattgaaaacttcctcgagtgccccacctgtggctgcgggttcgactgcaacgacctgctcatgctgcagaagcccggcgccgccaccgccaagctgcgcctgcggggtgccttctagaactccacttctgcagatttggtgactgctgctgtaagctgccacgactagtagtgctgtatgtctagtagatgtgggttaataaagagggcaaacttgaaagatcccagcttttagatgtgggatggggtaaccaagttcaggactcgatgtcatgtttcaccaactgtttcagacagttctaggaacagccagagaagcaattaaga

SEQ ID NO: 6288 - DNA, 406 bp, Zea mays
agcattggcttttataagctggtttgcgctggcgccatcctgtatcttgaatttctggtcgatggcctccagatgataaatataggatgttataaaacatagtatttttgaatggtttctggacaaggtcgctgcttatggtagcagcaaagcaacgcggtgccgtaaagctaattgtaatacccagaaattgttgaatggctgtggaatgtagcacgtggtcgaattgtctgtacaaaatacggagaggccttctttggatctgaaaaaggcttctgaatcttgccagtccttcctttttacgttaacatgtttctcctgtgtggtttgttgtattgtacgatggcatgcctaaatggctcgagatgattgtttttatgagtcttgttggcatcacgcatataag

SEQ ID NO: 6289 - DNA, 690 bp, Zea mays
aaggtacttgcacctgtgagttttgttgcatttcaacaacgaaatctacttccgttccgcctacctgctgcctgtgtacgttgttgtctgattcattgtgttgtgatgcatattgcagtatcgtagcctccagctggagttcctgggtagctacctttgtgagctcagcttgctagactacagcatgcttcgcttcttgccgtcacttgttgcagcctcggcggtgtttgttgcaaggctgacccttgatccacacacccatccctgggtatgatattgatcttcttgatcccaatcattcctgtctcactagttaccaaaacaccaactcattttgttatgtacggttgcagagcaagaagatgcagacactaactggctacgagccatctgagttgaaggactgtgttgctgccatacatcatttgcagctcaaccggaaatactcatccctgatggcgacccgggataaattcaaggaacgcaaggtaagcatgggccttgacagccgcacatggttttatgtcagatcgtttgcataagcatagtcgcagtgtcctaactggaataaacctcttgaacagtttaagggtgtatcagctttgctaccacctgttgagatcccagcgtcatacttcgagaaactgaaggagtagttgttcctggacaatctagtaagccaaacacaca

SEQ ID NO: 6290 - DNA, 367 bp, Zea mays
atttcagaaataagcaacccaaaatcaaggaaacaacaaagaacgtaacatcacatattagataagattatactcacatacttccaacaaaacagcatagttatgcaatgcttagctttgaaatctagtgctggaaacagaacaaaatgtcttgggtatgtaacttgttcgaaacaagcagcaaagctgaaagggcaatgccactggacacccttgggacgctacagatctgggtaacaactcatttcagagggataaaccgcgaggagtgagtggcaccaataccgggcctcccgtgcttgaccggcttgtaggaaatggagaactctgcaagatagtggccaatcatctcaggcttgatctcaac

SEQ ID NO: 6291 - DNA, 383 bp, Zea mays
ggagaggtgtgaggataaagactgccacaggaagaggcggctacatccgtaacatctcataccgcaacataactttcgacaatgtccgtgctgggattgtgataaaggttgactacaacgagcacgctgatgatggatacgaccggactgccttcccagacatcacaagcatatcattcaagggaatccatgggcagggtgttcgggtgcctgtccgagctcatggcagcgacgtcatccccatcaaggacatcagcttccaggacatgtcggtaggcatcagctacaagaagaagcacatcttccagtgctcctacctcgaggggcgtgtcatcaggcctgtgttcccgaaaccatgtgagaacctggacgtctatgatgag

SEQ ID NO: 6292 - DNA, 968 bp, Zea mays
  misc_feature (963)..(964): n is a, c, g, or t
attacatattgtcaggaaaaatgtggaggacttaataccaaaagcagttatgcatttcttggtatgtgattcatatccgattgtcctttcggtatgcaatctttgtgctatttttaatggcatggtaggctttagatgtcggtgctaaagctaaacagctaaactactaatgagtaatgaacattggatttaccattcttttggcctcaactactatcaagtatggttacatatctacagcactgcatttcttttcgaacacttgagcaagcaccactatttttctagattgatcgtgcaaccatttatattaattcctctttcttcagtcaattggtttcttcgtcagtgctaaaattgcattctagctagcagatagaccacatgccactcttcttttcttgactcagctttatatgtctgcagtgggatagctgagcagactgtcttgtaaatctacggcttcatttcacttatctgtgacattgattctgttgcaggttaatcatacaaaaagggcgctgcataattaccttataacaaaactttataggtgagaatacttatttgctcttatttagaacacaacctattacatgttaagcaaaagataatttatgcactatggctttacaactttgctccaaactcttaaatatattgcccaattcagagatgatcttttggaagacttgctcaaagaacctgatgagataaccataaagaggaagcagatacgtgaaaatctcaaggtccttcaacaagcttacaaagtacgttttcacagttctttaattcttccgttcagaagtcttggcaccacttggttccaacactagcttttcacctcacgtttcttctgcaccatgcagactttggacgagataccacttgacgcagaggcagtagagaggggtggatactccctggattctgatgcgattggtctgccaagggcccatnncttc

SEQ ID NO: 6293 - DNA, 378 bp, Zea mays
agagcctaccgtttgtaactggaaggtcccgggttcgagccccagcctctgcatattatgcgggtaaggcttggcgtttaaagatacccttccccagataccgcacagtgcgggaagcctacggcactgggtacgccctttagttagcacaagggtatttttattattgaagtccttacaaggtcatgtcgttctagtgtttctatttctttgctaccagtaggaccctctcctgatatacagcgtatcttggcaggcatagcatacaattggccaattcttcttggtggacaagctcactggacagttggacttgtagcaaccttgatggctattagtagcatcattgctgctgatacatctgctttcctttgtgga

SEQ ID NO: 6294 - DNA, 388 bp, Zea mays
agaaaattatattgcacagttgtcagttaggatggaaatttgatatccatcaataaaattgataaattatagaatggtgcaccttatcttttattttactagaacacagtgcaacttctatatattcttatttgtaacttggatatgttgcaaaaataataaatattactagatccttgcaaagagaagggggaaataataaaatctagaaaagaataatacaatacaagggagctttgaaatgaaatattatttatatacgaaccttctatggattgaaaagaccgtttaatctgttactggatttcattatatttgattcagctcctcagtgcaggtatgtactgttttcagtatcatgtttattttatgttctgaagtagaaatg

SEQ ID NO: 6295 - DNA, 370 bp, Zea mays
tcgttgggtttgagccttaaaacccaatgataaggttacagaagaaaccagagacaacacatggtgttattgcgaagggtacgtgaaggcaaaacaactttgtaaaaaatgtgtggcagtcagattaatgcatcaagagttggtcgattttgaccatatggctgagtggatagctggcccatccgttcagctctctctcttagttggctcagacgctcagttcgttataccaaaccagcgctttctcttacatggctcagctcagtataccatttcacaggtgctcaggcagaggaagcagaattggggaagttcgaatccttctaatcacggtgaactcaccagtgccaagcaaacaattacaccataa

SEQ ID NO: 6296 - DNA, 373 bp, Zea mays
gacgtcgcatccctccgccacccagagcaagatgcagagcgcgtcaagaaccccgaatggctggtcgtcattggggtctgcactcacctgggctgcatcccgctccctaatgcaggagactttggtggctggttctgcccgtgccacggctcgcactacgacatttctggtaggatccgcaagggcccggcacccttcaacctggaagtgccgacatacagcttcttggaagagaacaagcttctcatcggctgagattgctgttagtgttgttcgtgtcatcgtgtggccctgtcgtttttgtttgatcaacaacttcaccttttctcttgcctgggttagggcatacctttgtgggctgtttctgagtaaa

SEQ ID NO: 6297 - DNA, 360 bp, Zea mays
gccacgtcgtcttcggattcgtcagctccctactggcgtcagctcccaactggcagtcctataaagtggatgatccgaatgcgccgagaatgattcttctcgttattttctacgcgaacgtcatcttgctggctgaaattaagaacgtcaggatctacatcgagacggcaactgccgtggtgatatcttacgtgtcactacttaaaatcagctggagctacatctggctcgttctcttccccattgtcgcgatcggcttcatcgttgctctgtgcaaggagctcagtcacgaggacgaggccggtggatcacattcacaggagcagagcaatgaaggtgaaggtgaaggcgaagctacta

SEQ ID NO: 6298 - DNA, 599 bp, Zea mays
agcctctccatgtctggcccttcgaagaagcagcgcggcatgccggcactggggtgctggctaatggctgtcggcaccttccgcttggccttcacctggtcgtgcttcttcggctccgggtcgctctgctcagccacctactccgagatacagggtgcgtacgttctgctgaccttgagactatggcggccggaactcgatcctgatgctagctagctatcctttcagcttcgaaaccatgcatgcattatgagtttatgacctgggcttttcagtgatcggcgtgcatgggcgcacggttgcggtgtggacgctgctgtcgtgcaccctctgcttcctgtgcgccttcaacctcaccagcaagccgctgtacgcggccaccttcctgtccttcgtctacgccttcgggtacctgagcaccgagtgcatggtgtaccacaccatgagtgcagctagtctcgtcccgttcaccttcatcgctggtacagtacaatacatggatataattagatgacagggtcgatgacgacatcgctactgctgctaatatatatatatttcaatgcgcgtgcagtcacatccatggtctggatgctgat

SEQ ID NO: 6299 - DNA, 390 bp, Zea mays
tatcacctatatgaaacgagcaaaaagaaactgtcctgatactggcagtagcagctacaaaccgcgtgcttcattttattcaccatttggagcagaagcttatgaatccaagtctacaatgttacattacatcgcagccacagtcgttcaatcatacgtccagtttctcagctcagtagctaaacaatcacaatccttgccatcttatagcctagtaaacctcgacgtgccactgcttgttctttttcagctgtgacagcttctggtcccagctctcgcctctttgctcagccaccttcttgagcgtgtcctggatccccggcatcatccccttcaaaccacagaagtaaatatgcgcaccgccatctagcagcctgaagatttcgtcgc

SEQ ID NO: 6300 - DNA, 431 bp, Zea mays
  misc_feature (31)..(32): n is a, c, g, or t
  misc_feature (423)..(424): n is a, c, g, or t
actgagctcataaggtaattgcagcatatgnnggatgatcatcagcatcatcccattcatgacaaccatgccatcaggtcgtcaaccatccaaggtagctgaatttttgagatgccacggcgcagcccgatggaagaagtggcttgcgaatccgggcatatggctcttttggccgagagtgtacatatttatcagagcaacaacggcgcgcgtgttacaggagtgcagcatagcggaggcctcaagcatcggcattgttcccagctgataagaatacgcccccaatatattttttttgttatttttttgtccattttgcgggtcaaacgtcgacctggtatgtgtgtctagtgcgctagcagttaacctattcgaaacgcttactgacctgtgacgcccatttctcattcatgctggcactgnntaagatg

SEQ ID NO: 6301 - DNA, 385 bp, Zea mays
cgatgctgaaccgaacgaggaagaagcctgagcagcacagacagtgagtaagcaaacacttgacatgccttgcctcgcgagctcctgcaccggaacagtataaaccagcgaccgccgcggccttgattattctataagaacggcgctcgccgtcgccgcttacccgaacgcactcgacgctgtcactctccgtcgacgaactcgaactcgtcctcacggaggtgggcgaagaaccggacgggcttgggctggccctcgacggcgagctcgaactcgaccttgaaggggaagttggccgtgacgcgcttgcccttccacacgcagacgtactgcttgacgacgccctccatgccctggatgtccaggtcgggcgccttgaggacgt

SEQ ID NO: 6302 - DNA, 514 bp, Zea mays
ttgccttgtttgggtgtcccactgttgagcgaagaacggtttttgcatcaaaaagattaagagccttcttcaacatccaggaagacaaagtaagtttacacagttgcgtggtggggtagttggcatacatcttaacacataatattcggacagagaaaaaacaaaaggtcctcctaacatatgctcaaggctaactttttttaatcttgccccatttcagatatgcggttcctgtaaactgagaagttcgtgcaagtttgtgaaccaggaagtggccaggcataatagagtgattctatcagatacgatgagaattatctccttgtttgtactggacgcttgcccacaagagctcgagattaccgctgagttaaaagccagtgtctgcaagctgctaaaggacgccataaatctcagcagttaactgctgagcattacggagcagaagtttgctagttttcttgtccttgtagttctaatagcgtgctgtcagcatttatctggacttatggag

SEQ ID NO: 6303 - DNA, 391 bp, Zea mays
ctcttggcttggatccgcccgtgaaattcatccctgcgtcggctcacccacgcagcgccggcggcctccctcttgcgtacggagtagtaaaataagaattccggtcgcacctccgatccggccgtctctccatgagcggccggtttaaataggccggggacgacaaagatcgggcgcaggtgctggctggcacgcatcaggtttggctttttttgtgtgtgtgtgctatctatctccttgttccctcggattgtccttgtcgttgtcgccgtcgacggcacggcgatatccaagggagggaggaagggcagcatatcatggactcgcacaagggggcactagtttggggcgggggcgaggtgaggcggatcaacgtggtctacttcctgag

SEQ ID NO: 6304 - DNA, 1275 bp, Zea mays
  misc_feature (1254)..(1256): n is a, c, g, or t
  misc_feature (1260)..(1261): n is a, c, g, or t
atgaagactatctgtaccggtactggtggtgtggtcccaagcttacaacactgtaatatctttgctctggtaaacctacttcgacagccagtagatgaagatgagaaacgtgcagacagatgcaacgagcgaaagaatgatggtatccatggatttcttccttctgatcgatgagaggacgtggttaatctgtaaggttgagtaaggtttccatgagatgtatatcctaagaaggcaatgaatggactttatatcagatgcgatacatactgttggaagctggctgctgacgttgcttatctttgtagtgatgccaccgaatgttgaccgttgggtcatgagagaaccaagtgttgcctgagcttgtgatatcacgttatccatctggtatcattaaacatacagtaactcctcaggcatacaactgacagcattcatcattctgaagtgaaacatgtagtattattctagacaaaagtagtagctcgacagaaggctctccctgaaactatcaaatcgatgggtttgctatctataacaagtatataaatattatggtggagattagtaaggtcaataaatgcaacagtaacaataataaatccttttggtaactaaactggagattagtaaggtcaccaaatgagaaacaaataaaatcttctgcctttagatgattctttcccaataccagcaaacaaacagaggtacaacttaatcgactatctcgcccccaataccagcaaacaaatagagtacactcaatcaactatctagcctttccatatcagccacattttagagaaaattctttctatgtcatcaaaacttatacttatccccctgccattgaaaaaaatatgagttcccttatatgccattggttttatatttttccctctagctgctattgcagttacatactgtataaaatctccgttactactatctgtgctgtgtcatcctatctgatctatgtaacttccatgcccgtatcaccgcaagaaaaaaactagtcatccatgccgaaggcttctatgccacgttgtaggcctctcgcgctgcacgtcaccactcgccactgcaggccactcacgccacagcacaggtttaaattcatattgatgcttcttttacaggagtgtccttccatattgttctctcaagaagaaataggagaagagaaacagttgaaggattgtccgaaaggaggatatatttgtacctgtccagtactcctgccaatcgcagctnnncccnnagaagaactgatca

SEQ ID NO: 6305 - DNA, 1119 bp, Zea mays
  misc_feature (1097)..(1102): n is a, c, g, or t
  misc_feature (1115)..(1116): n is a, c, g, or t
tgtgccctctagcactgctgcatggcctaaccaaaatggaggaagtcctttgtgggcagtccgtgttttcacctggggttgtgggcattcttcttttctgcggaagaggccccacataagcctcatcggaggtgaggctcttcagagcaacgtctcgtacttcatacgtgcgaagaaggatctcaaaggttctaatatctgtggaacacagttggttttcgttagctccttcagcatggcaatttgaaacatgtgaaatacccttgcctccaacaaaggcaaggcgttggagttacatataaaagatccttgattagtaccaacataagtaagactctgtaaggtaaatgtatacaatgtgagtatgtgacttaggagaacctattatgtagtccattcaagacacttgaaagtgatacgaaatcacatactattcgacacaaattttatttactgctcatgaaataacactgcagttaggcagctagtactaatcaagccacattaacactgggagcaaactatataataattgcagttactcctgtctcttggacaccgtgctgaaagaatgcatacgcatgcaatcataactaggcacccaaacacattctggaccttttttaaaaaaaaacacacattttgtgtccaacatattcacaatcatgtttgtagcattcctctcagtttctactcctttcctttcaaaattttaagccatccttactatctagacataatggttggaacgatttataacagagggtgtagcaacttaattttattagaagtaaaaacaaatttaaatggacagtacatgccagtaaaaactacttcgacctaagagccccttgataatgcaggcatttgtcatgtaagaaatctggacaggtgtttccaaatagccagtctctagagtacactatgtttgataccagaccaaacattatcaatcctatctagatgaagcaaattaaaggagtgtaccatacctgtgaaacaagtcttcatggcctcacaagcacgctgcacttgctcaatacaaggcgaaaaggagcacagaacaccgtctttctttagcatcaatccgacagatnnnnnngcaagccaaggcnngca

SEQ ID NO: 6306 - DNA, 843 bp, Zea mays
cctcatcccccctctccctgtggcatccgcccctgcacatatgattgcacacgtaggggtggatatcgagccagcttaagctcggctcgttaaagaaacgagctggctcggctcgactcgttaagcaaccgagccagagaaccagctcgtctcgttcgcgagctcgagctggctcgtttagctcgcgagccataacaaaaataatatatatgtgtatatacaacaatataatcaattgctagttaatttcatactaatttaacactagaaaagactaacaatactcataattttattcatcacatcatttaaaccctaaattaacataattcatcacatattaattcatccaatacatatagactttgttttgcagataaatgttagctcattcgagctaacgagctggctcgttaacgaaccgagctgttatgttagctcaactcgtgacaaaattaaaacgagccgagctgagttgaccatgagtccacgagtattttatacagccatatgcacgcctactgcagacaaaccaaagcgcaaaaggagtatcatgtggtaaactctgacgaaaggagtctcgcggcggagtcacgatctgcttcggtgcccgcgtcaatcgtgccgaacagctctcccatctcctccagcgtccggccgcgcgtctccgggagacacgtgaagaagaacacccacgagagagcgacgatgccggcgtagagaaagaagctgccgccgatggtgatggcgctggacagcgacaggaaggtcatggagacgacgccgctcgtcacgcggttgcacgccacgccgaccgcgtagcccagcgcgcgcacacgcaac

SEQ ID NO: 6307 - DNA, 485 bp, Zea mays
agccgtcacctacgtcaaggagaagtacggcaaccccacgatgctcctgtcagagaacggtaattagctagcttgtcgtcatgcatgcatatcatcccctgcatcagctagcttgctgtatatatagtatagactggcatgatgcacgcacgcatgcaggtatggacgacccgggcaacgtcacggtgggccagggcgtgcgcgacgcggcgagggtggcctactaccggagctacgtcgccgagctgaaggcggcgatcgacggcggcgccaactgcgtgggatacttcgcctggtcgttgctcgacaacttcgagtggaagctggggtacacgtcccggttcggcctcgtctacgtcgatttcaggacgctccggcgctaccccaagagctcggcgtactggttcagggatgtcatcgccggcagcagcaactgaccacgtacgtacggtctctgatcagtcgatctgatggcttgtttacgt

SEQ ID NO: 6308 - DNA, 390 bp, Zea mays
ctctgcggacatgctgccgtcgtcatcgtcgtcgttgtccttcgtcgtccacagcaacggcagcaacgtccagctgccctgaattcgatcagctaatagtcgtcgtcaccagtcaccaccaccacaagcgatatgatcgagctaatgaggaaggaagctagcagagataagagatgatagtacttagtttggtccttgttaatgcttgacctctctttaatctttcgttttttttttcaccgatctactcccccctagctagatggatcgtatcgatcggttcttggttttcttttcgatcccgctgtgccgcgaccgcgagacacacgtacgccgctgcagtgcagatcgagtcttggggggccgggtctcgtaccgttcccttacgat

SEQ ID NO: 6309 - DNA, 356 bp, Zea mays
gacggcctgtacctgaggagttcccgggaagaagacgagtgagtgagtgagtgattggtagggtaggcgactaggcgtcgcgtcaggcagtacgtccttttggcgcctttttttcttctttcactcaccattggcgaccaccaatgaatgatgacactgactggggtgtcaacatcgcagctggttttgtttggtctcatgttgcatcactcgctgctccacgatgccttgctatggttggggggagatttgctccatccaccccacgccggtcaggcgacagagcctccgctgcgtcgtctcatccgtctggtgagttgccactgtcttagaatctgagtggtacggtacgtgtg

SEQ ID NO: 6310 - DNA, 365 bp, Zea mays
tgctcgatataaactcctacacgaagaacctcctttcagtcatgggttccatggccagtgctgctggaggcaatgaagggcctgatcccagggaaattgagctttatcttgaggagattcttgcgttgacacagcttggggaggactacactgaattcatggtgaataagatccgtgtattgagagatgtgaaacctgaacttgggccgcgggcgatgaaggccttccgtaatggtaactttaataaaatggagcaggatctgactgggttctatgttatcttcgaggagtttttcatggtggagaatgtgaggaaagccatacggattgatgagcccatatcagatggtctcacaacgtcaatg

SEQ ID NO: 6311 - DNA, 867 bp, Zea mays
cgtaacttctgcagatgttccaaaactgtgatatgacattcccatttatgtgttttagattttgacagtgtctgtgattttattggttcagttggttattgataaaataactaaaagctatccatttctacacatcttgaggaatgctaaattggtagcacatatgtaagatatgataaaattctacctgtcaatgtaacatgtgcattgcatgtttgtacacagacatctgcatatagattgaattttcattcttttggtatatggatcggaaaatgtttcaattgcctgttgtttgtttatctgatatgaggtttctgcacgctaagtgcaactagctaatgggtgagcaaacatctatgtgcagagcaattgtcacatttggtgtgaatgcactctacgggaggtataatgttcgacgttccatctgggcaggcaaatggaattccactaatgcatatgattttgtaaaatacacaatctcaaagggatacccagttggctcttgggaatttggtaaaactatctttttgctactgaaacattctgtctcatttcttatattccaagatagaagttctccaagtttatgatgcatgaaatatggggtgacagagacagtttgtttgtgaactacatttttacacagtctcttgttttgttaggcaatgagctgagtgggcatggaatcggagcaaaagttgatgctaaactttatggaaaagatgtaattgaatttaaatccatccttcggcaattgtataaggcaccactgtcccagccactcctgttagccccgggagggttctttgatcaacagtggtattctcagctacttgagacttcaggtcatggtgttgttaatgc

SEQ ID NO: 6312 - DNA, 396 bp, Zea mays
ctcaaagcggcggcagcaatgcagacctcatgtcggagctatccgcggcggacaccttcgccaccgactgcggggacaccttcgacgagcgaccagacctcaactcacccatacccggtgcgcagcgccacgtcaaccgcctcatcagcaactgccttgacctagcagccaccattaaggaacaaccctagatgcctatgatgtggacactaaaaaaatttatctacaactggctgaagaagaaacagtcccacaacctacttcaaatttacgacatgtctgcacataccaatgattgtgtggcttatcgattttggctctttttatgtcctttgatattgctggggcataaaaagcaatcatcggttattagtaggtggatacgtgtcgcaaaaa

SEQ ID NO: 6313 - DNA, 360 bp, Zea mays
atttgaagttttaccagatacactgttcaggctagatctttgatcatcatgctttggaggaactagccttctcatgttcacaaccctttcaaccatcttattacccatttgaactggattcacactgtcacctccattgagatgtgaccttctcactgctggcatggagctccctgaaggcacgctgccacttaaagtccttcctctggagggagagcaagactgccgtcttggtcgaccagctggcccactctcaacagagcaagatctagaactaggtgccccaggtctgcccctagtggcagaggttggtctttctggtagcgatgtccttaggtttggaggtgcatcaagagagaa

SEQ ID NO: 6314 - DNA, 891 bp, Zea mays
atcgctgatatccctcctgatgagtactcgtggcgcaagtacgggcagaagccaattaagggttccccacacccgaggtatgaaccgaacaagaaatattcaactaatatgaaaaatgtgtatcaaatcctttgcagtcataatgattgatgcattattccccttgcaccatgggaggtggcatatctgcatcaggctctcagggtgccccttttatctgtagaataattgtctgttgatcctcctccccactttatcttttccttcctcccaagtggttctgcaactaaggcctgtcgataacttagtagctagcacaattgaatatttggttagtggatagtctcagggctcaactctttttgtgcccatttactgacaaagcaatgatctgtcatggtgtgtgtgtgtgtgggggggggggaccaaaagtaggtaaattattattgctacaggcgtttgaatgccatgttaggctatctacatcctaatcttgattgcgctcattcccctaccccatatccaactttaagtctgctctggatgataggaaaatgtagctataccatgaaggcaagcacatggggctgattgttcccccctgtgtttcacatattctctttggctttaatcaaatgcaggggttactacaaatgcagcagcgtcaggggctgcccagcaaggaagcacgtcgagcgatgtgtagacgacccggcgatgctaatcgtgacatacgaaggcgagcacagccacacccagctgccagcacagcctgcccagacctagaagatcagtaaatcgtcgctccattctggaagcgcggggagcatgcctttgcacctagatggtcatgtagaatctcaggccttcgatttcgatgcagcagcagca

SEQ ID NO: 6315 - DNA, 395 bp, Zea mays
gcacagatgactactatggtaattttaattcttcacatgatacattggcccatggcagcagcaccactgcttgggataagcaaaacgacaaagctcaagacaactcttcacctgttgtttttgatcaatatgattctgatgttgaacaagagaatttgttggacacattctcctcaaagcatactgaacaactacctgctcccggagatcatatgagattctcaactgcagattggagtgaacagcataccagtgaatctccatccaagcagagaacgtcagccctattttccagaacagaaacacaactatctgataatttaggaacaaacaaaagtgatattccttcacctcattcttatcataacatgcgtcctgcttttgattcagatggt

SEQ ID NO: 6316 - DNA, 390 bp, Zea mays
ttgagtatgtgcaacgaaattcttggaaattattctaagaaagaaggtcaattgatgacagcggctttggcacccgtccgaaacgaaggctaaacagagtgatggatgctataggctttgaatatcctgactatgagcgactggacaagggtgctgaagggcaaaaaagaaaaagagtagctagtgctttgaataaagacaacgaagatcaatcaaagaagaagaaacaagaaaccgaggtgaaagcagttactttgaagaaaagaaaggcctcacactagtacagagaagatttatactggcggtcgtaaacctatttttagtggcgtttatcgtaaccgccagtactaggggccagtaaaaatcatcatttttacaggagggtaactg

SEQ ID NO: 6317 - DNA, 213 bp, Zea mays
cagctcatctagggacgccgtccggtcatttgctctctctagaattctagagtttgatccaatagcccaggaataataattcagcgcaaccaaaaactgatctttattttctaggagtttttccctccagtttttcctttgtattttcaccagactgtcttttccggaatcttcaaatttttttttgtttctctctcgatttctcgtgttttt

SEQ ID NO: 6318 - DNA, 399 bp, Zea mays
tggtttgccctaaaccacaaacccttgccaggggttcccttcaggtatctcaggatttgataaattaccctcatatgcccagctctaggatcatgcatgtacctactcaccacacaccacactcactgcataagcaatgtctggtcttgtgtgacaaacatatatacttcgaccaactatcctctgatatctttcccaatccacaggatcacctaactcagcacaagtttggtgattcttatcaatgggtgagccacatggacgacacccaagcattcctgtttctgccaacaaatcaaggacgtacttcctttgagagagaataattcccttagatgacctagcaatctcaatcccaaggaagtatcgaagtggtccaagatcctttacctcaaaggc

SEQ ID NO: 6319 - DNA, 1091 bp, Zea mays
gggagcggcggcggacaccagtctgtgcgctcgccatcgacatcctctacgacatactcctggacgtatgacagcaaacatgaatacaccaccatgacagcaatgggtaaatacccaccgggtattacaaccccatactcatacccacgacacaaaaataaccccatcgggtcacccatatacactggcgggtatggatttacccccatacccatacccatgtgggtatgggtcacccatcgggtcacccgtacccacaaaagctaaacatctaccaaaatattgtatgataaaaatgtcaagtatatccatctaaataccattacaaaatttctagcatcatttaaccatccattcaacacaccaaagataattggataaagtagtaacactaggatagtactacatagcatattacatgttccattacatggtcattaaattgtcgttaagtcttctatgacatcatggcctaaaaggttgttaaatagtaaaaaagatggatgactaaagtcaaagttcatgcttgggctaagtttatattgggtattttatacccacgggttaacgggtatgggtgaaggcggaacgttctaatacccgtttacccattgggtgaagatttttgcccaataacagacccacgggtagaatatttagcccacatacataccctaatggagtaaatacccatcgggtatcgggtcgcgggtacccattgccatctctaggtgagacagaatgtgataacgaatacacggtagcgctcacactcaccttggttagcattcgttttgcaagaatgtgataatgccgctgccagatccgctggccaaccattgtcgcgaccaggacactgtagaatatgccgatgactgtgaaaagcccaagcacaataacccccatgatgagaagcagcggtagcccagcttccccagcacctcccaagcaaccaccacactcgccagctgtggtagcacaaccttcgaagcaggtggtgcagtcagtccacatgcatagcgtgccaggtagatggcaatctgcacacatcctgaaattgaacaaatgttggtacaaccacctgtgagaag

SEQ ID NO: 6320 - DNA, 363 bp, Zea mays
tcgcggcttgataacgtcgacaagatgatatcatctgccatggcctcagatccagaggtgaagtctcttctgagcagcacatctgatatctggatgccggtcataacagcgtctgccaatgagaggcgggggtttgttgggacgagcagcgaaggcagccaggaagagcaggagaattccaagcaatagctggtatatgggctgttaatagtttcgttttgtgggtctgtaccgaccttatctatgttcattcaaactagtgtttccatgccaaaaactttgtggcgtaataaacaataaaaacccatgtccttcattcggattagtaatgagtgtgatgatagatctaaattactatcttgg

SEQ ID NO: 6321 - DNA, 422 bp, Zea mays
caccttgaggcttgagcgaagcccaagcccgaacctcctttgatcaacagcgggatggagctaaagatggcagtgaagtgacggaaagagcgctgcaaggaaagaatggaagagagcaggaggtaaagagagagagagagagagggtagcttgaggacggttgagctgaggcgagctgcgcggttcaagggagccgcaacgtgaaatcgcagcgatctctgtttccacattccagtttgaagtctggtctgtggcggctaccgttgtgctttggcgttccttttgctactctttgcgacagtttttgccctggtgcaggctggtgcttggtgcccttttggttaataaactgcgctgcaacgaaatgtggtggtatattacttcagttgaaggccggggcttgtttgtcccttgaactctaa

SEQ ID NO: 6322 - DNA, 521 bp, Zea mays
  misc_feature (512)..(513): n is a, c, g, or t
taggcaatgtcaacacgggcctagctgatgaaaaactttcaagctgtgtgacggagataccctgctgcagctctgcccgtactcatgatgataatgagagcgcaagatgtgtaatttgcctggtaagaagatgacacccttgtacaacagccggtttttttatttgacgttttttagtataaagttgtactgttgagagtcaaataaaaagaaatggaggtagtattatttatttcaagtcaatgcttatcaaacactggtggctggctgcaggaggattacaaattcgaggactctgtcgggaagctaaaatgcaatcacaagtatcacgcagactgcatcaagaaatggctgcaggtgaagaacgcttgcccagtctgcaaagcttctgcggcagatgacggcggaggcaccgaatgaagcgccctcccgcccccattcaccctatctcaggcgaagctgtactggctgatctggtttgctgtgtgtaaataatggtcctgaaacggatnntttgtgag

SEQ ID NO: 6323 - DNA, 513 bp, Zea mays
agaaagagcccaaagaaaaaactcctaaaagcaacattaagactaacaaatctggctcaaaggtatatagttctttttttttatcacatagctatatcgtttagctatatcgtttgacatgcctaactccatgattctcctttgatggctgacgctgaacatttgacatttgacgcatacacagccctcgcgccatgcggaaccaaactcaagggtcccaaagatgccacctccaaaggacgaggagagtgaagaggaggaaggggaaccacaggaagaccaggagagtgcgctgtgtggcgcatgtggcctaggttatgacgacttctggatctgctgcgacctatgcgagacatggttccacggcaagtgtgttaagatcaccccagctaaagcggaccacatcaagcagtataagtgcccctcctgcacgggaagcaagagggccaaggtttgatccacgatccaaggagcctttgacgagagctgtaagctgactcttcgtgctagggc

SEQ ID NO: 6324 - DNA, 377 bp, Zea mays
ctatctgaggttgaaactcagggttactattactcagctggttccaagaatcctgaaagagaaataaaattccataatccaaagtttgtttctctactgaaccatttacggttctacattcctcagatacttcccaacttggagaaggtggtgtttcttgatgacgatgttgtggtgcaaaaggatttgactcagctgttctccatagagctgcatggcaatgtcattggagcagtggaaacttgtttagagtcgtttcatcggtatcacaagtatctaaatttttcgcaccctactatcagctccaagattgatccacatacttgtggatgggcttttggaatgaacatttttgacttgatagcttggaggaagga

SEQ ID NO: 6325 - DNA, 1159 bp, Zea mays
atgtacacacggaccagtgatgaggtacggcttccacggttctggcaggaggcgtttgaggctgcatacgaggaacttgctggtgatgatgtgcaggtccgtgatgcagctatctctgagattgcccgaatgtcagcccacaaacttgagctcgagcagacattgaatgagaatgaggtacgcccaaaacctgtatctcacctcaattgcttccaaatgccttatgttttaagtaaactactatgcattctggtggtttcccttatttcgtgagagtgacacttcttaccatgtcaactcatcccacttcagaccaaacattgttatgaaggcatggcatgcatttgtatcccatttttagagcaatggtccgaattcaatatgacgcctgaggcctgacaacataggatgtttggtttcagctaatggactggcctcagcagaaccatcatgagcataatgactgatagaaatggaactaacgacttaaaacatagaattcacaaccttccaaaaacaacatgtggggggtaccgattattatgctttgattgtaatgcggtgcaagtctctgcttacctccaaatcgcttatctcctttaatgtgaattattttggtacagcaccatcagcattttttggtgaaactgatagcgttgtcgtgaattgttcggtttgcacattgtcttgtacccatgctctgtcttgtatagttttcataaacaatccatctatctttgaccagcctacctgatgaagtatctaagtacataatatacatgacatatcagatgctcaatctacaccagaacgtggatactttgcacagaccctaggcccctaactgatctggtttattcttgagactcaacaactgtgcgctaaacaggcacattaaaactggctatgcacgataataagggtttatcaacacgactttcttatctccagtgaccttgtgcaggaagagaatgccgcgagcaacagtggtggcagactggcaggtcaaaggcgagtcagtagttccacagagatatctgtggcctgaggacctgaagactgattgctgataaaatcgccaggaggtgcatttggggggtttttgaagtgtgttctggtgaaattatgaaactggatgttcactggatctgtagtgtac

SEQ ID NO: 6326 - DNA, 886 bp, Zea mays
  misc_feature (825)..(827): n is a, c, g, or t
  misc_feature (829)..(829): n is a, c, g, or t
gctctcttctccttctccagataatataatacgtatatatatgtcacaatctgattgctatgccctgctgctgccctttttaatttgcttcttcattgttgctgcagtttctcgcgatgatccagctactggccaggtatatttatatactcccttcgtttcgttttaactgtcgctgaatagtgcaaaattgaactatccagtgacaactaaaaaaacagaaggagtatataactcttctcttctgtaactgaactgagttacaacttacaaccagccacaatttatacagatttacagtagcgttttcttcttcttctttctttctttctttaacagttcgtcccaatcaacatgccaagcgacccgcagggactgcaatgcatgctcgagtatctcagccaaacctacaacaacatccccgtctacgtgcaggaaaacggcaagtgtggccggtggcctactcatcaacatcaaataaataaataaataaataaataaataaatagccagcagttttttctttgcaattcctgacgactcctgttctgctcttccattccgttgctgattaactaggctacggggcgctcttcaacgactccatccatgaccacgagagagccgagtacttgagtgcctacatgggcagcgcactcgctgcactcaggtacgctacgggatatatatatatatcagttcgatcgttgtggctatatatcgatggaataaaattaactgatccaaggcctgctgcaggaacggagccaacgtgaaggggtacttcgtctggtcgttcctggacgtgtttgagctgctggcggnnnantactcgcgatacggcctctaccatgtcgattttcaggacccggagctgccgaggacg

SEQ ID NO: 6327 - DNA, 372 bp, Zea mays
cgtcgacgccgacgagtggggcgacgagaacaggaggatcgccaccgagctcagggagcagcagcgccggctcaggaaggcgctggaggaccaggtgcaggtcagcagggagaccgccaagatggcgcgctgggtcaagcaggcgtccgcgcgcatgacgcacgccgaggccattgacgacctgctcagtgactgcgaggacgacctcaaatgagctcacgccgacgctttcctcgtcggttcttccactgtctttgtcttgttggtgatcacaagtctgtcaaaaatgctcatatgttttcatgagtgcatttgcatccatgctttggtacaatgcttatacagaagaagcagagtcacgaaacaatgcta

SEQ ID NO: 6328 - DNA, 1035 bp, Zea mays
aaactatgatgattctgtactaattaaaactgctgatgttggtcaggtaaaagtgcatgtttaatgtatgtcacctgtttatgtattaaatttcgtatcttcaaatcgtccactgaaaaacaaaccgaaacagatgattatggtaagagaagaaaatgatcctgctccagaaggagtcgagtacaagcatgggcttactcctccaatgagggatgcacgcaggcgacgtttccgcagagaaccagacctgaacgtaataaaaatttattgccctctagctctacttgttacccagttcatgttcatagaaacacttctaggtggaaccctgattattccttgtacaatttattgccctctagctctacttgttacccagttcatgttcatagaaacacttctaggtggaaccctgattattccttgtacaattttgcaggcagagctggttaaccaagttgagaagcatcttatcagtatcatgcatggagtatctgtcagtatccttttgttttcttctcctgccacttgctaaatggtagcatgtgttgtattctagcagctggggaaaaatggtatatagtactctttttttactatttatttaggtaatagttttctcagtatttttctggctactaacgttggttgacaaacggtttgcctacatggagctccctccctttttgacaagcacaatgacgtgtttctttgaatcttgtctgtatagtggtttcagatagatgtttaatgttttgaaagctacacttgaacaccagttatacttctgaattggttgcttataacatcgataagtctgacatgcatttggtttgttggttgaaggattctctgcctacagctttgtttcaccgttttttgcgaactctgtagatgtgcatttttccttgactattagtagaccagaacgccagtgcgacaggaggcgaagaaggtggtgatcgtaagaaacctccagtagctcgtgcagccaagcagcctggggttcaggagcccgccgcgaaggagagaagc

SEQ ID NO: 6329 - DNA, 922 bp, Zea mays
  misc_feature (904)..(906): n is a, c, g, or t
tttcttctcttttttttgttattacgatgggtagtgtgctgcaatttgtatcttatttttatttctgcttgaactttctttttgtaggcagagcaacacttcctgaagcacaatgatgccggatcctggattcaagattcggcagtgatgctttctgttagcaaagaggttccatggtatctggtaaataactgctgtagctattacactgtgattttctttgctttttcaaatataagactttcaatttagcctgggctcctactatcaataatttatgcaaatttggctttacaactaagtttatggtcttctcttggcaagctatgatttcacttgtgtggataaactcagcttacaagctccaaagccccagccatgctagctcttgctggccaggcttaaaccttaaattagcccctagcttaggtagtgttgatattgtacatgatcttgtcccaaatggatgataattctaagcatcagatatgtcaatgtttatttaaatgtttatcaagttacagttcatgatgaaaatgaatttggcttccagatttgctatatgtaccccttcatgcaaaaaatgatatcatttttaataattttatttgcagtttacaactggaatgcttctctaacctttaaacaatcactaggatgatggaactggacgtgtttatgtggtcggtgctcgttctgcagctggtttgattttaactgttgccagtgaggtttttgaggaatcagggaggacacttgtacgtggaactctagattatttacaagggttgaaggtttgtctaatcacatcttcaacagtgctaatacttatagaaacacaattagtgactaaacaattatctctatagatgctgggagtaaagcgaactgaaagggttcttcnnnactggaccctcattga

SEQ ID NO: 6330 - DNA, 494 bp, Zea mays
gctggatgagcccatgattgacgtgagctcgagtcagttctacggcgaaggatacgatgatagcgacaagaggatccccgacatgactataatcaacaagcagctaggtatttgctttggcggtctctctgggcgtggtgtttttcttcctcaacctgttgctgatggtctaaacatggactgaaatgtaggttggaacccaaagacgcctctcaaggatctgctggagacaacgctgacgtatcagcacaagacatacaaagaagctgtgaaaaggcaaatgtcgcaggcttcagcgtcgacttagatagcgtgcccctggctctcgtctagagcctagtcgcagctgttaagttgtttcggaagcgcaggtcacacatacgctagtgatctttttttttgaggccctagatgtccgtgttgttagataatcaagggatgctgtatcagtatgatatatttgtggcagagttgatgtattccatcgttgagct

SEQ ID NO: 6331 - DNA, 388 bp, Zea mays
ctctccccggccgagtttgtcttgtgcatgtagcttagtttttgttgtcggaactaattccttaaaaaccatggtgatatgctttcagccattttttatgggcagcctatatgtgcaaaaggaattgaacttgccatctggcaatttggtgaggcttatgcctctatatactaccctggcatgggtcctctttgaattgaaattggatgcttgtattcttaaattggcccagttctttttacatactcccatttttagttcatgatcctagaaattcatagaatgtgatggtatccctagttgctacgatatgacagtatattatctaataccgggatctatttgttggtccctactaattattttggtcatgtcatgtgctggatta

SEQ ID NO: 6332 - DNA, 380 bp, Zea mays
ctgctggacccgaacctccgcgagcagtgctcggaggaggacgccctccgggtgttccacgtcggcctgctgtgcgcccaggcgtcgccgaaccttcggccgcccatgtggaaggtggtggagatgctgagcggcagggatcacaaggcggtggcgcttccccggcccacccagcctcccttcatcaacgtcaaggggtccagcggcaagagcgacagctccggcgggtcggcgtccaactccgacaagtcgcccttctcgctgaaccagctgtcagtcagtggggtgcaggccaggtaaaagctagctagctagctgcggatatcatgtgtttgggctagcggcatattttttttcaagttttgtaagtcgtggcgtgg

SEQ ID NO: 6333 - DNA, 644 bp, Zea mays
cactgaccaatcgccaatgcaccttggtaaattattgcgcgctaccactaaccgaggggtcaggcttgtgagaagccagcaagaagtccagcatgaccttgttgaagcgagccggatcctccagctgaggagcgtggcctgtcttcggtatcacctccagcctagcggtcccgttcagagccctgccgacacagcgacaagtcagttggtgttacttagcagtcagcacgggctgagccatctgtttgtttgtttgtttttgttttgtttttttggaagaaaaaaaaacgggcatacaacacagtgtgcctgtgaagaaacgctcgtgaggagtacctctgaaccgcaaacgccttctccaccgggaacagctggtcgtggtctccccatacaatcagcacttcctgcacaacgcacgtccatggcgaaatttcagtcacaggctcacagacagaggcgcgggcgtgcggctagctagaggccagagcgtcatctgatagcgcgccgcgcgcgagacaacctgcgtttttaacagtacctgagatattggcgtcacttggaacttctctgtcccgaccgtaatccccttcagcagatggacaagccgctccctgttctgcgtgaagagtttctggatgaagtca

SEQ ID NO: 6334 - DNA, 1242 bp, Zea mays
  misc_feature (1190)..(1192): n is a, c, g, or t
  misc_feature (1214)..(1214): n is a, c, g, or t
  misc_feature (1224)..(1226): n is a, c, g, or t
  misc_feature (1235)..(1239): n is a, c, g, or t
ccgcccgcagcagaggcgccgcatcggtgagctcatcgccattttttagcctacctacaacatttcgcgtgcttgttgaattcaaactagctaataaacaggtcacttgtcctgcccattgcaattgcctcatccccatcgataatgaaccagtgcaaggtttagtttgttgcaatctagtatgtttggtttcgtattggcttgctaaataagttagttttaacactagtttgttcatcctttaaactgtaacaccagttggctgttccttgtttgtaccatgacaccacctaatattcaggcctggcggcctgcactagctaagcctggatagctcccaagccaccacctaccgggtgtccgggtgaatatgctaatcgggtttgctatgcttgtatctgatttgcagtgcattgttttccctttatgctatcgatgaagtaaccaaactaaaagttcacttgctttactcaacaattgctttcattgatttacttgttatgtatgatttcccccctattgcacctgctgacaagcgtataatttaccctgctatgttctctgtgcagcacgtcaaaagaaggctgtgaagatattcccacgaccaactgctggccctcttcgtcccattgttcaatgccagactctcaagtacaacatgaagtcaagggctgggagaggctttacccttgaggagttgaaggtgatgcattgtttgctcttgagccatgtttgttttgttgttctcatatcaaatgaattgctgttgtatgtatgccacatgctatttttgtgtgaaccgctgtatagaggctgatatgctgtcttttgcatgaccacaaattttataatgtttataaattttgctatctcatggtgtttaatttttgctgttccttttctacttgttgaattaccttgtgttatcttgatattagaagtaactatgttgattgcaggctgcgggcattccaaaaaggcttgctccaaccattggcatttctgtggatcaccgccgcaagaacaaatcccttgaggggctgcaggccaatgtccagaggcttaagacatacaaggccaagctggttatcttcccaaggcgtgctcgcaaggtcaaggtatgagtagtcatcttttcctgaacaattaagtatctcttgaaggcattgtctctggctgctttgatctcnnnaatcccttatcacctacttcgntgcaggctgnnnctctactcnnnnnagc

SEQ ID NO: 6335 - DNA, 915 bp, Zea mays
ggtcaaatatttatatgcggtttggtttggtagtattcctggcccttatttcaatgtgggttttaccaaatcatgtttggaaggtatgattttatattccatcgaactttatttgcagagaatttatttgtgcttagctagcgaattgtggtttcaattgtcttctatttgtttcgagttttcgtatgatgctgatacatgtcgcatatagcataactttacataggtagttgcagcttatggtgtttggtacgtccattcgatgtgttagtatctttagtctgatgcagcaaagctgtgatgtctggctttaacttcatccttggttgcacattcgttgtaatgcagctgttcattttccttctaggattcagctaattatttagcactttgctcagtggtttttgttccatcgtatgttcaaacttttattgtgggatgtgcttgtttctactacctgtaaacaaaaccacattctctgtaggatcaacttggaagggttactcttctttcaggattcatattcatcatgctgggatttggtgctgatggtgcaccttcattagtccagatgagaacgcctccaccttctgttctaggcataccgaacattccttgctccacaagtgggtattcttacacaatcttgaaactgggaccactgcaatttacaaggaaaggcctatcattagcaagtacttcagcaagcctctcctttgcagtatgtccttcacttacaagtattttaggcaaactctttggcttaatccttcattatcttacacttttttatgccttttgtttacacccaacaaatcacacctgatggagagcacactgtagagtgacttggtttgcacatgaaactatataatatgcactcccaaatttgttgtttgtatgcagatattccaa

SEQ ID NO: 6336 - DNA, 1042 bp, Zea mays
  misc_feature (1029)..(1029): n is a, c, g, or t
taacctcttatgacattatctttacatcttctcacccttgcgtggtgtggttaactttgttttgatatccaaggaaaactactgtgaagacctagtaattccgcaccatatagttttgtttcccgtgagctggaaagttttgttttacctagcttatacttatgtaattatgtttttttggtatctgatgacatataattacatgtttgcttgcttacgttgattatttgtgctcatattttatttaaacattatatttacattacagcacctaaaagctgtgttgtagatgagacctgactacagatagaattctggtttcattaagttttgcgattttctaaacttgattgtagttccctatatttggatatttgacaggctgagaagatagcatctcggatgatttatgaggatagaatgcggggctcaattgatcaggtgcttaaacaagttattttcttgaaataatctatatgatgttaaagcataaaaatttctgctgtagatttgcctttgtaagttgatagtgactggaaccatgtccacccgaatattttctgttggttcctaggttgaggctgtgatacattttgatgatgacacggaagagctgcagcaatgggatcagcaggttagtaccataaagcgtttcatgtcatggaaattggaaaggcaatgcacgtagacaaatccgcactcacttgtagcacagaagcctcatgtttgtctcaacttcctgcgatctgacacctatgccaattattattttcaaagaaaattaattaatcgccctgatcggttgtacttgcttgatacttgcagattgctggactgtgccaagccctgaatgacatccttgacagcatgtcaagcaagggaataactattccggtgtgaataaatatctcatgctgtcggtcgatggtgcatggcagaactgcttccatgccccggaatctagaatcaacattttgtatagtttgcagctgcaaatgtgtatcttgtgattttggggggaggatgctngttaagtaacgct

SEQ ID NO: 6337 - DNA, 454 bp, Zea mays
  misc_feature (445)..(449): n is a, c, g, or t
tagtactgccatctccttttcccaagttttccgaaataattaagaattcccctcgtatttcctgatccatacaggacaactactctggaagaattaatcagcctgaataacaagaccgacaggaaatgcagcaccgctgaaaattcatgtgcgcctggccgaaacatcctcgcgctcaggaacaggcagtcaggcatggtgggcctaccagccaccaacctggaatccgacaccctaaagcaagcgatggagaagctgacaactttaaggagcagctgcagcttcatcgtcgacgagcacgggcgcgtccaaggagtggtgaccacaagggacatcatctccgtgttctccccgctgtgcatggactcgaggattgacggggccacgttcttctcggctgcgctcgagcaggctggctgccgcgttgagaacgggcagatgttcnnnnnattag

SEQ ID NO: 6338 - DNA, 1171 bp, Zea mays
  misc_feature (1111)..(1118): n is a, c, g, or t
  misc_feature (1148)..(1150): n is a, c, g, or t
  misc_feature (1164)..(1165): n is a, c, g, or t
aaccctgagcccaaaaatatgctttgcaagagcagtcaacaaatctctatgcatgatttagtgtgttattcatggcacgttatacatacttagtggaactagctgcctttttatatatccctattttacttagggaccattttatcatttcattttggaggaattgttatctacttaatggactagcctatttaccttgggatttgacattccacaactttccaaagctaagatataagtctatcttaaattcataggatgagagatggaaattgattctatagatcatcatgctatgtttttactttgcaacttataccacgttttttttggcttgctccccctacagcacaaatgtagcacataagtacctccctcatatggccaacaatagtatacaaatatattcagcatacaaccatattagcttaattgaatagtgtctaaattatgactaaattgttagtattagaatggatttcacttccaaggatccaaaaaggaccttatgggttttgttaccacattgtatgcttcttttcggtgtttggtgtctacttatgaaactagctgtattacattctttgcctgtgaatggcttgtgcagcaagtttaatgttctagctcagaagtcttatgaagacttacttcaagtgtttagatttggatctatttgctttattgctgggcatacaattgataatagtcaatccatgcagcctgagaagacaacaggaacaatcaagcagcagctagctgctatagcgccaacacttgagcagttgactaaacagaaaaatgaaagaagaacagagtttgttaatgtacaatcacaaattgatcaaatatgtggtgaaatcgctggcaccatagaagtgggtgagcaggtgacaacaccccaagtcaatgaggatgatttgacacttgagaggcttgaagattttcggtctcaactccaggagcttgagaaagagaaggtacttttctatcttttgcctttttattggttatgacgctatggcgcttcatacatggccattgctttagtattggttattcctgaaaataatttggtttgccgagtaataggctggagaaggttcttgagtannnnnnnngtacatgatcttgtctgtctggggatggannnctcagcacaggacnnagtcac

SEQ ID NO: 6339 - DNA, 417 bp, Zea mays
ttttctgaagaggttagtcatctatccatcagaatgaatctgcaaagttttgatagcatttaccttacattttttttggctggaacagcatgaaacgagttgtagcagtgagaagagattggaaagtccctcgggtggcaatggagaggctatgaaaccgcttgaatctgagggcaagacgctttcccagaaagacgacaataatgatgatgactcatcagaggatgctgatgaagaagaagaagatgccgagctcacgaaacaattgaacaagcaaaggaaaaaggcaatagcagctgccagtggtcggagaaggccagtgtcgtccaggaacgcctacaaggacaagggtaagggcaccatgaactccaaaatccagaggcaggcgtgccagtggtgatggtcactcgaatgtct

SEQ ID NO: 6340 - DNA, 400 bp, Zea mays
gcacgagctcagccctcccgtggcgcaccctgacctgcagtcgagttctgtactgctatctgaagacggcgctgcgaaggtacatactcctgtcctgtccagcactccagctctccatgtgtttagctagctactagctacagcttggtgttccaattccaacctctgagttccccccctgcctgcagatagcggacatgagcgtttggcacgaagtgatttctcaaggcaaaacgacgacaaatggtgacgaacaagcgtcgtccgctggcctgctggcggggaatgtgtacagcttcggtgctctgctgcttgagatcatctccgggaagcttccgactccataccccgcacacgagcgctccctgcagatgacctcggtaacgagctatcgacggaa

SEQ ID NO: 6341 - DNA, 376 bp, Zea mays
gtttacaaatgatgttctgtttgaaagtttccacggtaatacttaatgcacatttgtgcaagcttgcattgagattcattggcttaatgaatattaattactcgctggtcctcctcctggacacgcatataattcatatagttgatacatttcttctttggtgctgcagaaacagagataaaaaagacgagaaagctcagcacgttttaatccggctataatcggcgccctcaagaaaccagtgaacaggagccaggactaacctccagcagctgcagcccatactgctgctcctgaccactctggacgatgcgaatcagtcgcatgacaacgcacagcggcagcaggataccagcagcacgaagtaagtacattg

SEQ ID NO: 6342 - DNA, 387 bp, Zea mays
caaaacgcgatctgggttccgtgaaccaccctgaaaccacagtatcatggcagttggcctcggtttcaggcacacgcgccttggccttgacgcagcaaggagggagcggtttgcgggcggcatcatccgcacttccctttgtcagtgccgctgctgcagaaccgtttcttgcgtctccaacctccatgagtcctattgctctttgaaggtcccagtctctggctcaacaacaaagtcaggcaacagcagaatttcagacacagaaaacaagcaggggcgtcatttatcagggctgcttcgtgccgaagcaaaagcaagcgaatcgtatgcagactgaacgtcattatcagtgctgcttcgcacggaatcgaaatgaaggattcatag

SEQ ID NO: 6343 - DNA, 454 bp, Zea mays
gcggttagctgggagcctgggacacagatcctggaagacgcaaagagattctaagtttaggaacccccaccccacacctagttctattcttagctcagcaaatcctcctccgcgcaaaggcatgaagcaaatgctcatcccgtcagaccacatttccccccacagagatcacatttaccgcgcacaaagcaccaacaacgatcgatagactgcatgcgagatcatcagcacagggagggagggaggaatgaaggatgatgcggcatatagactctacccaccaccggtgctcccatcgtcaacacgacgaggtctgcagattggtctgtgcgttctagagagagcctgagagggggagaggtttaccaactgcaagagcggagaaggaacacggatccaaggtttcacacgtaccgttgggagaagatgagttgctttggatgcttcaagaaag

SEQ ID NO: 6344 - DNA, 454 bp, Zea mays
ttgatagcacaatggagattggtcttagaggtccaaccaatctatttggacatccaactgacaagcagatgattgaattggatcaagcattatcacagtggaatactgactttgacaaggttccagtgacaaaaatcgcatatgggcacttcccgttgtctttctcagcattaacagagtcaggaaaaagtatcaaggatgtttttctaacgcaatcattggcagcatatttgtgtggtcatcttcatacaaggttcgggaagaacttgaaacgatactaccatcgggcagtccaggaaccatcattatcagagcattactaccaacataacatgcaccaaggagatgcattccagggtaataaggaaaactgttctgaagaagcttctcatattgaagagttctgggaatgggtgatcaccgtctcgccgtttcccagtcctgacagccttag

SEQ ID NO: 6345 - DNA, 370 bp, Zea mays
ttctcagtcagataaagcactgttcaacagattgtgtccggcaaacaaggaaggcaagaggcactttgctgacataatgttccgacgtctgacaaagttgggcgtttcaaagacagaccccaatgagcttacaccagatgaaatcaggcgttttgcaaggcttgatatcgaccctgagtccattacatggagacgggtgatggatgtcaatgatcgtttcctgagaaaaattactgttggacagggccctgaagaaaaaggtatggtgagagaaacaggctttgacatatcagtagctagtgagataatggctgtattagctcttacaacttcccttgctgacatgagagaaaggcttggaagaatggtg

SEQ ID NO: 6346 - DNA, 489 bp, Zea mays
ttgctgaactaaacagttctcattacatggcaatctgtatagaggatgactcaacaagttcaggtatgtaatcggaatatttcattctgcagacagattgctccgtttatcctgctcattcagctacatcgtttgcaatgctgcagattctggaaacggtagactgccactaggattgaaagtatggaagaccactccgttcgtggaagatatacttgtttctggaacggaagctgtaaaacttgtcagttaagtatgtgagaggatatctgccattggtcaagtgatttcgccagatgacaatgtgatgcaacgaatgtatttggacgaagtatgcgctgtgcagggaggctgaacggttttcttcgagcatactgcatgcattgatgaactgaccactgacactgtgtgctttagttaagatttggaaatgcaacgacatacactttggagtcctgatattcatattagcatatcacgacactgttt

SEQ ID NO: 6347 - DNA, 1411 bp, Zea mays
  misc_feature (908)..(909): n is a, c, g, or t
  misc_feature (912)..(913): n is a, c, g, or t
  misc_feature (915)..(925): n is a, c, g, or t
  misc_feature (931)..(932): n is a, c, g, or t
  misc_feature (936)..(939): n is a, c, g, or t
  misc_feature (941)..(942): n is a, c, g, or t
  misc_feature (951)..(952): n is a, c, g, or t
  misc_feature (956)..(956): n is a, c, g, or t
  misc_feature (962)..(962): n is a, c, g, or t
  misc_feature (965)..(966): n is a, c, g, or t
  misc_feature (976)..(979): n is a, c, g, or t
  misc_feature (981)..(982): n is a, c, g, or t
  misc_feature (987)..(987): n is a, c, g, or t
  misc_feature (996)..(996): n is a, c, g, or t
  misc_feature (998)..(999): n is a, c, g, or t
  misc_feature (1003)..(1003): n is a, c, g, or t
  misc_feature (1018)..(1034): n is a, c, g, or t
  misc_feature (1036)..(1036): n is a, c, g, or t
  misc_feature (1042)..(1051): n is a, c, g, or t
  misc_feature (1062)..(1071): n is a, c, g, or t
  misc_feature (1073)..(1073): n is a, c, g, or t
  misc_feature (1076)..(1078): n is a, c, g, or t
  misc_feature (1081)..(1095): n is a, c, g, or t
  misc_feature (1097)..(1101): n is a, c, g, or t
  misc_feature (1103)..(1111): n is a, c, g, or t
  misc_feature (1113)..(1117): n is a, c, g, or t
  misc_feature (1119)..(1123): n is a, c, g, or t
  misc_feature (1129)..(1142): n is a, c, g, or t
  misc_feature (1146)..(1147): n is a, c, g, or t
  misc_feature (1152)..(1163): n is a, c, g, or t
  misc_feature (1166)..(1173): n is a, c, g, or t
  misc_feature (1175)..(1183): n is a, c, g, or t
  misc_feature (1186)..(1212): n is a, c, g, or t
  misc_feature (1214)..(1236): n is a, c, g, or t
  misc_feature (1238)..(1258): n is a, c, g, or t
  misc_feature (1263)..(1274): n is a, c, g, or t
  misc_feature (1276)..(1294): n is a, c, g, or t
  misc_feature (1297)..(1321): n is a, c, g, or t
  misc_feature (1323)..(1374): n is a, c, g, or t
  misc_feature (1376)..(1378): n is a, c, g, or t
  misc_feature (1380)..(1408): n is a, c, g, or t
cgcgaaggaccaccaaacggactcgctgcggatgcgatgaacaaggccggggtacagaaagctgtttgcaggaactgtaatggcagtggtgctgtgatatgtaagggtctcgtggcgcttgttcacttcgtcagctccaaactcctggacctactactaccaatagggatgtaccttcagtaggaaatggaagctaatataaccaacagctttgttcattggaatgtctaaaagcctgcagtataatgccatgtatatatacagaaatagtgtctatgaataattcgatttcatctgtgtgttcaggcgacatgtgtggtggcacagggaaatggaaggccctcaatcggaagagggcgaaagatgtttatgaattcaccgagtgcccgaattgctacggtacgttctttctgcctttctagtgtttatgcaaatgcggcatgtagtttgagatgcatagcctcatgcattcagaaccaatcgtttttactcttttatttactactccctcaaaaagaatgcaattccagatttcaaacaaaccaaacttttctaaattaaaccaagttcattaaaaaaaatgagcactgtgttcttttgagaacaaagaaagcacacatctttcatgttgtttatttgagcatttcaatattttggtatgacccatctttgaagttgtcaagaactgatcatgtcgctatgtctgttaggccgcggaaagttggtgtgccctgtctgtctcggaactggcctgccaaacaacaaggggctcctgcgacgcccagaagccaagcagctgctcgacaagatgtataacggcaagatactgccgaggtcgtagagcactctttaccacgcccaggattttgttgagtcgtcgagtaggaatgacgctcggatcgatgtannccnntnnnnnnnnnnngcagcnngctnnnncnngattgtatnncggnaaagantanngccgaaggtnnnnannccctncttttccangnncaangatttttttgagtcnnnnnnnnnnnnnnnnncncctccnnnnnnnnnnacccctatcannnnnnnnnntnctnnntannnnnnnnnnnnnnncnnnnntnnnnnnnnnannnnncnnnnntctccnnnnnnnnnnnnnnatcnnctttnnnnnnnnnnnntcnnnnnnnnannnnnnnnnatnnnnnnnnnnnnnnnnnnnnnnnnnnnannnnnnnnnnnnnnnnnnnnnnncnnnnnnnnnnnnnnnnnnnnnctcannnnnnnnnnnntnnnnnnnnnnnnnnnnnnnttnnnnnnnnnnnnnnnnnnnnnnnnnannnnnnnnnnnnnnnnnnnnnnnnnnnnnnnnnnnnnnnnnnnnnnnnnnnnannntnnnnnnnnnnnnnnnnnnnnnnnnnnnnnctc

SEQ ID NO: 6348 - DNA, 655 bp, Zea mays
gctactgactgacctactcggatactaagagacctgcttgttcaagtagactctcttcgaaaggaacatagcgacctacaaaacgaatctcattatgtaagcctttttcttttagtatgtcaactaagatttggtttattggcagttgtgctgttgccctttatctagcaaactttgttatctgattttatccagtgtaaatgctttatacaaatgcctaaaccaactcatcactttgttgaatatttggcttgtcacgctacctttgttgcatcttccagcatggttcaacagttattttcatccatccctttcaaaaaaaaagttattttcatccagatttcctttccgggaaacaggtaacaatggagagggatgagatgcaggatgaaaacggcgtgctccgcaaagaaatttcagagcttcaaaacgagttgacaatgcgggtttcaggcagtccagcaggttggggccatggcaccgccagatcagatccccctcttcctcactcaaccgcagtgttctcgtcggagcaggcgatgcaaccacccaccattgcaagcgttgtattcccgttgcagcagccactggcaccatcagcaatgaccaaaccacctcatgctgcaccaccactcgaactgaagctctttccaga

SEQ ID NO: 6349 - DNA, 640 bp, Zea mays
tcacatccgtgcgcgaccaaggcaataatggtgtcgtcctcccgtgctgtcgtcgtcgtcgtcggcctcctcgtcgccgcgtcctccctcgccgtcgctgcctccggtacgtacgtacgtcttagtaccttacctgcagtgtatgcgcatgaccgcgcgttgccagagcagccaggggtagggtatgacgatgctaacaccggcatgcatgcacgcatggtggcatgaacgtacgaacggcagatggcggtgggccgacgtacgggtacacggcggggagccccgacgggccggagaactggggcaagctgagccccgcgtacaagctgtgcgggcaggggaagcagcagtccccgatcgacatcgtcaccaagcaggccgtccccaacgccaacctcgacaccctcaaccgcacctacgccgccaccgccgccacgctcatcaacgacggccacgacatcacggtacctatatatatacgtacatatgcatgcatggacatgcactgatgcacatataatataggttccgatgaatgaaagcatgcatacatgtgcacgtacgtacgattgcagatgacgttcgagggcaaggtcgggacggtaatggtgaacggcaaggcgtacagcttcgagaagat

SEQ ID NO: 6350 - DNA, 1313 bp, Zea mays
tctgttgcgagcacgtcccatcgaagaacgttaggtttctcatggatccgccaccgccattgaaggcttgaagcaaaatagaaaccctttgctgtaagttggaacttcccgtcgacagcgcaccacggacatacaagtcattagcactttatcaggaccagaaaatattccacgccaatgtaacgattaatgaacacggtggggcaaggcaataataagcagaagtgcaaactcaacattcagggatcaaataccgcaggtggtaggttcatattccggttaacaaactcatggaacgccgtatgttcatgtgccattgcgatgccacatgaacgtcagttcaagataaccagttaggccttgttcgtttctatcggattggtgggttggaacgattcctagccggattacttctctaatttatataaactttgattagctggaatgattccggttgcaatccgacgtaaacgaacaaggccttaatcatccccaacatacatcataagctacagttttcaacagagacctggcttccggttgggcgatcacttggggttcctcagcacgatgatgaccgagtcgcccctgaggaacatcttgctgatgaatctatccttgttcacaggcagagccttctttttgcccttgccagtcttggggacctggaaagaaattgagtcctaggatcattgcacttccacagattaaaaccttatagaatcatgggagtcaatcaagtctggtagcagacttcgttacctctgtccacatctcccgcacgttctcaagcaccatgttacagtggcgatcaaaagcacgaacccggccaagcagcttcttgttgttgcggcaattgatgagaacctgaatacatcaggaaaacaacaaattttagctctattgactaattacaagcaaaacacagtggctggacatcataacggtgaggacatacttaagtatcaaattatcggagagaataagaccagaagaattacatcaaaacaactgctactttgaacacagcataataagttttaaaataactgcagcattcacgaagctatacaagacagtttttttttctactgcaacaatgaacattaaggtttttgattgggagcaaaacgacagaaactagtgtgcatagcaggagctcagtcatgtatcgtgtcatttccattcaccaaaagggttttcccaaacctgtaccctcaaacttgtacgggacccaaagaacaaaaactaatagcacaatgcacataagtttctagcaaaataacaggaagggaattgtgtacctgggtgtg

SEQ ID NO: 6351 - DNA, 392 bp, Zea mays
gcctgacaaagtccggcctcgacatccctgtggaactggacaagcttgccaccccacagctccaagtggcgtagcaaaagaaggcgcgcggctcgccatacaaccggaacagacttggagtctcgaggaacagcatgcattttggtttggcactgatgcaggcagcgcagcgcagcgcaggacgcagattgaaaatctgtgatagatgaaatcatgtttttatttctgtttctaatgttgtagtgcaggcccgtgcgtggtgcgccctttctgttgtgcgttgaccgttgaaaatctgtgatagatgaaatcatgtttttatttctgtttctaagaagcaaattgccgtcgtatcttggcacgtgttgtaactaaaaaaaacgggtggaaac

SEQ ID NO: 6352 - DNA, 875 bp, Zea mays
gccctcgcggccatcgcgctcctagcgctctggtccatgttcgccgcctccgtcacgctgcgcttgtcctccgtcgatctcgccaccacgttcggggacgcgagcgatccgctcatcgacgaacttgatcccctggtacgactcatcaatcccttcccttactttctctcctagatctagccgcttacttggttgttcatcctcctcataacttacgatgtgtaaatgcgtgctaagagctttctggtattgcaaaagggaaaggaaagtagacggtgtgtttacttatatagttctagatttgaaggggtgattgtttacaagatattctaaggcaggaaaaagtgggaggtatttgtcagtttatgactcgtaaaaaaaatgtcaggttatcactgagctcatctgcccttacaagatttttcaattttcaggacgattagcagttagcaccatgctaaactgttaataaacagctacacttacatgaactttagtctccattggtttggttgcaaggtggttagattgtttcagctagactagacaaacatctcttttgccatgcactcatgcttttgggctgtaagacaagactgaaacttgcctaaccgtggttgaacaggagatggagcaaagagaaaagctagtgcgccggatgtgggatgtgtacacacgcacagataatcatgtacggctaccacggttctggcaagaagcatttgaggctgcatatgaggagcttgctggtgatgatacgcttactactgatgcagctatatctgagattgctcgcatgtcaatccataggcctgaggttgagcaatcgtcgaataaggattaggtatgaactaactgacctatttgtgacttat

SEQ ID NO: 6353 - DNA, 856 bp, Zea mays
gaagaggagatgattaaggcagcaattgaagcttcaaaaagggaagctgacgggatgaaaaatgtatgcttctgcttttggattttaattatacatctactcaaacaaacttttaagaaaacctattgtgaacaggttctaagtagtggtcaatctgaaaacatgtcacgtggcagaggtgatcatgagcttgctcgggcggtttctttgtccttggaggtagccttttaacttctaagatgtagctatgtatttttgttcatatacctatacctgcaatgtgtttttttatgtggctatcagacagcagagcgagagagagctctgcgccaagagggaatgtttgtagcagatcactctcctgacttatctgataaagaaggcggtcaaggaggaagtgggataagcgaaaggtgaagtcacatttccaaatgggtagaacagtggtagtgtgtggattattacttatttataatcaattattaatggctcaatttctgttcccctatcatttgtttttttgtatggtttcatttgcatggaagccatgcatcgtgtgggatatgatattgtttccctgtttgtgtgggtcacttctcatgcaatgtttttagcgagcttttcctaacctttgtaagtataatctgtgtctaattggaatatacttggtagcagctgattcctcatacatgtccattcttattgtaggcgaggactaactacaggagaagtgggaacttctgagcaaacagtagatgaagagaacttccaagaggacaatgaagatggtgaagaacaacctttagttaggactcgttctaggcgacttcgaggcagaactattgagccagcaaaa

SEQ ID NO: 6354 - DNA, 382 bp, Zea mays
tcagtcttgattaggagtcctcatctttcttcttcttttttacctcccatttctgggacgttttctcgattgccggtgctcgattaggtaaagagtagtagtaactagtacagtacgtagcgctgcgactgcgaggtagatgcatgtgggatcgtggacagttttgggaatccccttcttcaaggggaatggggatctgggttctttacagctgcagtgctgcgaaggagcaccgcaggcagctgagatgaaatctagtggatctcttctgttgttagttgtaccacgaccacggtaaaaaaaaacaacaacaacgtcgtcatcgcacgcccatgtatagctaaagaaaccagacgcaacagcctgctaaagatgcatgtca

SEQ ID NO: 6355 - DNA, 366 bp, Zea mays
ttctcttggagctgaccaccggcaggttggccaacgacggcggtgagcacggctccctggccgactgggcgtggcggcacctgcagtccggtaaaagcatcgccgaggccgcagacaagtccatcgcggacgccggttacggtgaccaagtcgaggccgtcttcaagctcggcattatatgcaccggtcgccagccgtcctcgcggccgacgatgaagggcgtgcttcagatactgcagcggtgtgaacaggcgcaccagaggaccttcgacgagaaggtcgccgactacgacgccgctccgctgctgcaggtgcatggaggtagccgccggaaacaactctccgatgccgaagtgatcgacgacg

SEQ ID NO: 6356 - DNA, 388 bp, Zea mays
  misc_feature (384)..(384): n is a, c, g, or t
tctcggagcacgtaagttacgaatcttcgcttcttcttgtgatagtgtttcgagttgcctcatgtttaccttgagtcgtctgccggctcgccacatggtcaaggcgcatcgccgtcgatgcccgctcgattccaccgtcagccagatttttctggctcgatgtacctgcgacgtagtgtggagatgagacgcgcaggtgacgccggatgctagggaaccggaactagatccggtccctgctactgtggtggctgcgctggtttctgaattctcatattgggatttgaatgaatccttgaaacatttataacatgccttgaccgcttgtttacttaggtctctagatgaggagggcattgttaagatttgctctggaccatgagncgtg

SEQ ID NO: 6357 - DNA, 484 bp, Zea mays
aacggccaccttttcaaaactctacaaggtgattggcgaggaaacaaaatgccaggtcccaaatattttgcatcgtcaattgacttgtaaagccttctcatgttcactctgttatatgtgaagctaacatggtaccggtttctatcatgatgattcatgtgaaactgatggtcaaattgtaaaaatatctcatcagcttcaaccctgtgaatgaaaccctggagacaaaccgacgtgtcattattcattaagagcatatgaacctatattcaacctttaagaatgcccaaaagatacacaattgtcaagtgaaggggactaacttggtaagcctgagcatgattcccagcatatctagcaactacgaagtctccttggactagtgatggccttttttctgccaaaccagggacctcaagagacaaaaaatgcatacccctccttctcattaagacaccctccatgtcatatgttctcatctcct

SEQ ID NO: 6358 - DNA, 397 bp, Zea mays
gttctgaagaactgggcgccccagacacaggtgctgcggcacgaggccgtgggtgcctttgtaactcactgcggctggaactcggtgctggaggcggccatgtccggcgtgccgatgatctgctggccgctgtacgcggagcagaggctgaataaggtgcacgtggtggaggagatgaaggttggggtggtgatggaaggctacgacgaggagttggtgacggctgacgaggtggaggccaaggtacgactagtgatggagtcggaggaagggaagaagctcagggagaggacagcgacggcgaaggaaatggctgctgatgccatcaaacaaggcgggtcgtcttacgtcgaacttggtgagtttttgaagggtttaggacgcaagtgatggatag

SEQ ID NO: 6359 - DNA, 498 bp, Zea mays
ttttttttttcttctgtgcgttcaggttgaagcgcccagggtgcagccgaagctgagcgagcccttcttggggttcacccagaccgcggagatttggaactccagggcctgcatgatcggcctcatcggcaccttcattgtggagctggtaatggatgcgcactacctgtcttcgcgagcatgtaacgacgtttgaggcgttgcttctgttcctacttgagtttcgttctcaatgttcgatggaccggcttcttaatttctaggtgctgaacaaggggattcttcagatgattggggtggaggtgggcaagggtctggaccttcctctttgaagggtgaccaaatagtaacattatcgtttgctggtgtattatgctggccgaaaaacatgaggggtttcacttgctttttgacttggtggctacatatgcatgttcatcatgcatgtccttggatatccggatgttacaacaccaactgtgtttaatgacttggagg

SEQ ID NO: 6360 - DNA, 373 bp, Zea mays
tacttggacttgtgcgcaatctcaaatcctggaatattgtctacagcttcaaacaaaccagctggcaaaggtttgtttgctgcctccttgatggcactggctagtgtttgagtggcatgctgaaatgcttcaactaagaattcagtaccattgtcttccctcttggccttcttggatggtttagttgcagatgttgctgcagtgtcattctcatggacagcactagatgttgcaatacacccttccttttgcacattttcaccatcatcaacagcaagagggtcatttgatgtctttgcaaatcgtcctgatgcaacactattaccaaaaattgtagcaaggttgccatagtagggaagaggcttgtttattt

SEQ ID NO: 6361 - DNA, 912 bp, Zea mays
  misc_feature (898)..(902): n is a, c, g, or t
ctctcaactctttcttctttctgtagcttgtctgtagtaacgtaagtcatttatttaatataaaagacgaatcagtttgccttccattatacgagtttgcctaatatatccttcttttaaaagatctcggcaggatgtaattaagaatcacacattggaatggattgagaagtattatccaggcttatttgagcagatccatttcgggaatcattttgctttggaaggtcaatcaaggccaaaatcagagatttgcaggtaatacactggggaacatagtgtcccaatcatttttaggagactggtaagtggtaacatagcttaacatgcactgaagcataagagcatctccagaacacttcaaataccaccctccatatcactgtgtggctatccactccataagatcccctttccatatttcagcacactagcagactagcaaaatctcgatccgtaccatgttgatctatgttttcttggtattcaaattgccatgaatcgaaagtttttttttcttgattttaagaattaaacggatactgtttaagttcaaatacttcataaaaacagccaattctgaagaatcatagcttaaagtccagaagatattttgagttaaatctgattagaataggttctttggtaattatttctatggacaaataggtggacgtgatgccaggaaattgacatattcacattttgaatttattggcgggaggggtgggggaggaacttgatatattcacaatctcgaagtaaaaagaatgtgaataagcatggtcctagctgtcagcctcacgtactggaatatgccgtttagcgaagcacgcacacaagcgaagtttggctggccacccttgcctgataccgtgtcaaacagagatgataaggnnnnnagctaatcca

SEQ ID NO: 6362 - DNA, 408 bp, Zea mays
aatcatcctccatatagtaatcctcttcttcttggatttgttggggttctggttctgatatttgcagagaactacttgagctggaaccagcttgatcgctggaagaaccctgtaaaacagtaggctagccagtaattataccaatcaaagcattaaaagaatgcacgaaaaggacaggcaaagtccttctgttccgccatccagaaccctatgtttagttagtcgtgtggacgatggactgattgccagttagtagtagtataaaaatatgaatagaacaaatgcatctttatcataaaggccaaaacaactgccgcaatgcttatcgcaatcctttgcaggataaaataaaatcacagggaacagggaagccatctcctgacagtgttcaccgatccgctagattaa

SEQ ID NO: 6363 - DNA, 355 bp, Zea mays
ccgcgaagcccagcggagttgcggcgcagggcaaggagccggcgcccaagctcagcgagacggcgacgaagccgtcagccgcgaagagcggcggcgttaagaaggctgagcagaagccccgggaaaccaaaaggaaggtacgtgctgtagtatatcactgcacaggcacagctgcgtcatatgtctatgctatccttgtgattaccttgtgacctgttcgtgtcgtgatggcctaaaagtacgtgcttcccatgatgaaaccaggtgaagagcagcaaacaggcggcggcggccaaaaagtgacgtacagtacgtgtggagtgtaatggagcttccatgcatgagtgaatccatg

SEQ ID NO: 6364 - DNA, 355 bp, Zea mays
tattattttttattattttctctcctgctttaatgctctcgtagtcttgttcctttagcacctcgatcgagccttatgttcttccttccgttcggggggcggagatttgcaggctagatcgatcgtcacggcgcttctgctgttccaatgtaacgtgagcatctctagtatacaggaactggagctgtagtttagctagttgctttgcttggcgccttggcggtgctgtgcgtctgcgcccccttgtcttggcgcggtgcgtgagagccgtcctcatcgcgctcgcgcatcggagtgcgattcgactgctgctcctcttgctactatttctttacattttttccccctccactgt

SEQ ID NO: 6365 - DNA, 814 bp, Zea mays
tatatcaggtttgcaaatcaccaagtttttaagtagtatgttatatatatacttaaattttacctttttaagaagtcacatgaacttggcaatggttttgttatacatttttattgataaattgttaccaaaatgctaatttgaattatcagtttggattttgagcaacttatatttgccaccttcaggatcaatgtacattttttgagccactcaaatattatgattaattgattatatctgaacaaagagggatggatggtgggtagtttagttttattagaaaatagtgtatcctttgttactttctaaagaaatgtcatttgtttttttatcaagcaggccaatcatttggttgtgatataaatgggaatttatattgcttttatttctttcagcgatcgttttctgcctgacaaagccattgacttgattgatgaagctggatctcgtgttaggctgaggcatgcgcaggtattttaagcgatgatttttcagactacaaacatttgctgcattgttcctgctgattttgagctttggtgttacagctccctgatgaagccaaagagctggacaaagagctgcggcagataaccaagcagaaaaatgaggttgtacgtggacaagattttgagaaggtatactgttgtttggcacagcggcggcaacgccgatctgctcccacctctctagcaacgccgatctggttaataccaagcattatgttgtttccttttgagataaatattttgttactgattttaccttttgtctcctcttcttgttttttgttctataatctgtagcaaat

SEQ ID NO: 6366 - DNA, 799 bp, Zea mays
  misc_feature (793)..(793): n is a, c, g, or t
caaggtatgttttgtgggattactctggatattttttaaggtgaaaaatggttgatgaatagtatttatatgcagcatatatcccttgtcaattctacagttaatttgaatatagaagggagcaaatacacagtaagtttgacattccataagggaatttattttagttgacaataaagttagattggcatcatcctgagtttcgtctgcatcatgtcgtagattgaaactgtaaggactggacatggtagctacaggttgagaatgaatgattcaacagttgaagcgaatgtacaatctttatgtgatggtggcctcttaatgcaggtaactagttcttttttatgctttattattaattagttggataaatggtttcgatttctgattgttaaactgcaatggctccagttggatggaaacagccatgtaatttatgcagaagaagaagctggtggtacacggcttcagattgatggaaagacatgtttattgcaggtaaatactcccttcttcctttatattcttgttgtctgattgtataactttgctagattatttgtataatttattattgcatttcaccccactaacttatctttaaaagatgggttctgttgtttgcttcagcaggcgacatcacataagaaaattgtgattaatctttgttttcttgcagaatgaccatgatccatcaaagttattagctgagacaccctgcaaacttcttcgtttcttggttgctgatggtgctcatgttgatgcggatgtaccatacgcggaagttgaggtnatgaaa

SEQ ID NO: 6367 - DNA, 361 bp, Zea mays
ctcggcacgatttttcaagaggacgacgacaaaggtggtgcttcgctagcctgcgccatggatggagatcaagatatcgactgggatgaccggctgcatttcccagcagctgacaaggaaatcgatatatccaagcacatccgggacatgattcatctggagatcaccttggatgcagtgtgcaaccccaactgcaagggtctatgccttacctgcggcgcaaacctcaacaccaccagcagctgcacatgcaagcccaggaacgtccaaggactttctcctctcaaaggggttttcaagtgatgatgcggataccaaagtttgtacaaccagcccaacttcatgtcatgctgtgagcctg

SEQ ID NO: 6368 - DNA, 509 bp, Zea mays
  misc_feature (495)..(507): n is a, c, g, or t
caggaactgaaaagcatgtcatgatctgttcggccattgaaatgaaacttgccatcaaacctctttactatggacagttgaatggaagtataaagaccttgtgtagttgtgttgtaccatgaatattttacctgaagaatggtttgtggagattcatgtggcacattgttaacttcaggggacaggctcccacggccatcagggctatcctcgtttgatgaaggtgaagaaatatcaaggcccaggccactgtagatagctgcattatttcttgccaaaacattatcagagccaacttttatccggactttaagtctgttttggtcactacattttgacggcccatatgaatcatgggagacggaacccctttcagactttgtggatgggcgtatttcctttttagttgaatcaccagaaaaaggcaccacaggaccattactttggggggtagatgaaactgccacagctggaggtttctgagacaagtcctcnnnnnnnnnnnnntg

SEQ ID NO: 6369 - DNA, 397 bp, Zea mays
atgagactctggagcattttatgctagttaaatatacaggcaatgtgtttcctacatggatgatgaacaaactgacttcactcccataccttgtcaatctttgtttgttccacctgcataactgcagtgctctccctccaattggccatctacaaaatctgcgttacttgcatattaaagatatgcccaacctcacaaatctagagatgggtctttctgggaggcctgtgtctttggggaaattgactcacctcaaactggaagcactgaatttagaagagctgtctatactcttgtcagccaacaatgagagtccctgtttcatgtttcccaatcttgaggagttatctgttctatcttgctctaagcttgtcttcaaaccatctggtgcctaaaa

SEQ ID NO: 6370 - DNA, 488 bp, Zea mays
tgtcgtcttcgtcctcgccttgctccttgtggcctatcgtaagtaactaaatcaaagttttcgattatcaagctccttttgagactctactactatatatcaagctctgttcaagattattatccatgctgatgagcggtttatgattgtacgtacgtactaggtgcggaggcaactgtctgcatgaggcataacaatttctatcacggtccatgcatgagcaacaaggactgtgccaactcgtgcgttcaacataacctcggtgtcggcgggtattgcaggggcaagatcccatttaacaaagaatgcatgtgtacatttgaatgcccatgagtcaaaagccactatatctgacgggcgcaacttgttatatatctagggatgggatgtcgtttggcatgtactccattttgaaagtgtccaagtgagactttatacatatatgcagttgagagatggaattaataataagagcaaacgcatatgtt

SEQ ID NO: 6371 - DNA, 617 bp, Zea mays
tctcgccctgatgtcctggccgctgctggcggattcttggctatcttctttgcttgcttggttgcagtgtatattggagcagtaggagttgctatctttgccatttctgccattgtcatctcatcagttgttggagttatgattactactggtaaaccatctttattcccctgtacaagattgtattgctgttggtatgttactatgcaaacaaccttcaggcataatataaatcttaaatactttacctgaatctccaaccattgtagaagatgttctgtacttctgtatctgaagttaatttggtcaacgttaatatggtgaaactataagaaatgtttcttttttttccaactgaatcatctcaatctgtacacttgcctgtgtaataaagctagatcagaaaattagtaatgcctagttcccacaaggtgcctgcgttctcgcgttagcatcagaaacgagtcatgcactagaatgtttttcaacaattaaggagaaccaaatgttagttgcctatttttatatgcttaacagtaaattgtcaatagtcaccaactatttttatatgcttaacagtaaattgtcaatagtcaccaactcttaaccggactcgc

SEQ ID NO: 6372 - DNA, 1323 bp, Zea mays
  misc_feature (1313)..(1315): n is a, c, g, or t
gcgcagcggcggcggcggcggcgtccatggcgaggaagcacggatggcagctccccgcgcacacgctccaggtgcggtctcggtgcctttcctctccgcttccgatcgtcgcgaatcactcaccggctgccaccgccaccgccaccgcctcctacttcgattcctttttacctgcggagtagtttcgggatcgtttcgttccggtatgtgctaggaggaagagatgtgtgacatcaacattgggtgcaatgcagtaccccgcgagtccgcgacgcggcgacggtgctccggcctgctgcaaattcttgtttttctttcttcgcccctgtacaacctacgtattacactgtgaacccattgatcagtaccgggacttggtttccttctcaaagcccgaaacacctgcagacccactgagtacgtttggcttcatcatgttgttcgtttgacgattaaacctgccctctcatagtctcatggcccgggtcatgttctattttaccctgtcgatagtgaatcttcttctttttatatatattccacagatatgaaaacatgctgctctagtggatattgactctgactgattcctaaaaggttgatcctgttaatataactattttttcaatacttgattggattaaacgaagatattctcgatactgcgtttgggctagtaccgctgacaaaatttcagactaccaatgaaattaccaacttagggtccaaaggcattgtaaccaacgtataaaggtttcggtatgcaccttttgtttttcaacattacatattaatatattatattcccaagccagccttttgcttcagatcatcatcctctgatgataaaacacagacttacccaagccatgctgttttttccctccttttctattttgtggaatgacagttctcttaatatctcatggaacagatcattgcggttacggttttcttccttctggtgattgctttttatgcattcttcgcaatgtttctagggaagcaagtcctagagtatgttgtgatcggtgtctacactgccgtggtgagcctgccaaaccgcacctgcattgtatttctctgtcgttatttgaagcaatttatgtcttcatcataatttctacctgtatgtgttcggtcaggtgttttctgtcgccatgctttacatccgctgcactagtataaaccctgctgatcctggaatcatgtcaaagttcgacaatgtcctcatcgatgcacctggaagtgctgccaacatacagggcacggatttgccagtgaaagctggtatggcgctggaacaatctccnnnatcggcaa

SEQ ID NO: 6373 - DNA, 871 bp, Zea mays
acatgcttttttattctgtggggggagtaactgtcccagctgagggccgttgcaggcttcacatcagttgttggaacaggtcatgcaagtccgatgctggatcctctcacttcgagtgaaacttgcggctaacagactcgtagctaggaacatgaataactgcaataaaagcaattcagttagtcgccataccttgtcgggcaccaatgcaccatgactactcgaaactgctgaacataccgtcgccccacgatgccattgtgagtggtgtagacatcatctcctttgcggttgacaaaatgtcattcaaagtgatctcctcaactgttttcaggaaatactcgatgggcttcctgaaatttcagaaacatagaatcagttgaagatgacaacagatctactggactctggagaaatggacacaactgctgcatggatgctttggatctgattggactcaaaaagactataccaacttaggagtaactaggttgtctaagcatacatccacacccctcaacaaactgagcgagactcagatatctttggatgtgcttgtacttgttgggacccaaatagaaaatcttccagcatgactatattgatatttttgcgaggatacggtgcataaatgtagcagaaaatagacctaatttatgtactagcacagcaatactctcatacctttccccataagtaagaacctgtcttccaatatcttcagatgctatagactgcagaagaggaaaagtgtgtactgtaaagaacactttaggaaaacgggtcatacagttaggatttgatcaggagcaagaacagtgtacccttgattccaagttcatcagaactgcagatttggttgcctctttag

SEQ ID NO: 6374 - DNA, 366 bp, Zea mays
cctttaggccttgttcgtttgtgccggattggtgggtcggaacgattcctaaccggattgcttctctaatttatataaactttgattagctggaacgatttcgggtacaattcgacacaaacgaacaagaccttagtcagctgttgacattcttttccccctcataagagaactgtacataccaacaacggtcgctgctgttgtactaccagtagtatgcaatgtggaaccaataagctttgtatgcagcgactgaaactcctacatgtgtaagactgatcagtaaggtctcgctgggctctggctcggtggcgcttacaactttgttattttgccatatgatgattgtgccaaaccattattctt

SEQ ID NO: 6375 - DNA, 1210 bp, Zea mays
  misc_feature (1141)..(1145): n is a, c, g, or t
  misc_feature (1165)..(1167): n is a, c, g, or t
  misc_feature (1178)..(1179): n is a, c, g, or t
ggttatatacaaggttggtgttagccaaattcatgtgaataagcacctgcaaattctttctccttacagtggtaatatgattgttgcatatgtgtattttcactaaatacagggagggacaagtactgggtataagaaatttgtctcagaaaatggcattgaagatgatacttattcagaaaatggggttgcactttttcgagttcagggctcagggccagagaatatgcaagctattcaagttgacacggtaatttatttttattgtcttctccaaacaaggcattatggttgtgttatggccttcttatcttagtggattcctttctaccacattgtaaaagctatgacaatgctatgattcttattaccaggcagcaccgtcgctgaactcttcttattgttacatattgcatgacggagatacagtatttacatggatcggtaatctaagctcatcaatggaccaagagcttgctgagaggcagctagatgtgatcaaggttggaggagtgctttttagtgattgtgttggcatggttgaccattcaaatgaacagtctgctatgttgctgctgcacttcgatgaactcattatccacatgacaatttaggctttagctgtgtttcttctttctgttatttctagattgatgtccgccagtgggtaatgactagttactacaaccatctaagctaaagattttcgcagaacagttatatagtagattgctagttactgcatttatgatgacttaataatcactacagtcatttatatgatttctactaatatgttgtacgtattaattgaatgttatcttcagacttatttgcacaccatcaacatcatacagtataatttacttatcctaatttcctagttactttttgcatctgtttcctgtcaagtgtacatcatgttattactagatcaacagtccttgtttggcagtaaatcagttcatcacttgtctacttgtattatgacataaatgcttcctgttcccaacttgcatattagcttgttgattgcttctgtgtaactatatatttatactctacctgagcatgtttctgtcctggttgcatgctcactgctctatcatataaactactacaacactgaacctttccattnnnnncatccactatatgcagccannntttgcagtccnngaatgctcaaagaaggatctgaatagatcag

SEQ ID NO: 6376 - DNA, 507 bp, Zea mays
ctctcgtgtcggtccaggagcaggcggcggcggacgaagaggagcagcacctcgccgccgtcttccaggaggcatcgctggcggccatcgaccgcgcgatgcaccgcgacatttacctggtacgcattgttacaactactcttctaggcttattttcttctatcaaaagcaagctttatcagcatgtatttaatatagttaattgtatgcaaacataatacaggccgcggtttatgcgagcaagcagacgcgatgccactcggtcgggtgccaacaagtgaaggactgagaactcgatcgacaccagtagattaagtgggcatgacgtcaataataactaattaattacgtacctagccgcttgtactagtcatgccctactttatattactttaaaagatacatttcgttgtgtaatcatcttatggttcatcatcgtcatgtgctccactatatactgtctcagatctatattcatcactggcagatctcaatctagctagcacc

SEQ ID NO: 6377 - DNA, 376 bp, Zea mays
tatacacccactaccagaaaagcagcagcccccccaccacaaagtgtatggctagctagtgcactacagacccggaaagaaacattatgagagcatgccagactcttttagcagctccctctctccatcactcacactcatagggggcattgaaagatggaggagcatgagcaggttattgcttaccatatccttgcaattaaagcacctttgaacaaaagatcggaaagggaaaggcgatatcatataccatttggtacaacttcaagtggagaggatcttttaggtctttttttccctgcctcctccttgttagtgaatcgaagccggcatttctatcttacgctttgattggtaggttaacgcctgctaacaa

SEQ ID NO: 6378 - DNA, 393 bp, Zea mays
attaacttagagcaatatcacaagtgaatttggagaacttaggacacaacaaaatcgcacgaaagtaaatgcacaagtgagacatgcgattttatctcgtggttcgaccaagactgaaatggtcgcctacatccatgttgtggtgtcctcttggacaagggttgttttcaatccctttcaagtgatccaaagatcaaacttgagtcctatagtcttccttatatcaatagtgtcaggtaccgtaattaagggtacccccaatactcctaagcatggctggagaacatcttgaaaacgagccgtaaagaccggtaagcgtggttcaaagttaaagcctcgtctgccaagggacgcgatctcgtctcgcccgagcccggcctcgggtaagaacag

SEQ ID NO: 6379 - DNA, 388 bp, Zea mays
ccactcatagtgtcatcctcttgatgagagttagagtccctctacttacaggaacgctactaaaactaggttttaacactacgggaacgagattgttcccacattcctgaaaaaagaacgtgatcaagttccacgtttccggtttctaaggtctctaaccactgcagcttatgttggtttgcagcttatgttggtttgtgttatagaaagaaactgtatatgagatatagaaaccgtagcaatgcacggtcaactaaatagtcaatctcaatctaggaagaagcctatcacattctgacattaaatataaacatcgctaaaggaaaaacaatatactcaatttacgtctttaagtgtatacggcgcaccctcaactttctccaataga

SEQ ID NO: 6380 - DNA, 712 bp, Zea mays
  misc_feature (703)..(709): n is a, c, g, or t
tgacctcattcatgttattactccgaaaggaagaggtcagtggtcttttctgccccttgatttctttttccgaatgcatttggaattcttttcacaaatttcaatctgtcaaaatataattcactatgcgcctttgcatgatttatctttctttccctactatgactaaacctggagctaaacaaatggacagtcgatgagacattttgattgaaagtttcctatcctttttttcccttttgccacatgaaatgctcattgttgggcagttgtacacttctacttccctggttgagaaaaattgttcatctttgtacagttgtactggtccctcttacactgttctcaatttacttctcatgtgaaacagcatccgtgcctgattcagtgaaggcagaactcctgcaacgcatccggtccttccttatgtctaccacacttcggtagtcatttgtcgcgacggttggagcctatatgtaccattgtaggatcattgggaagtcgatcttgttggggaccaaagggtgcaggaaagcagtgcgtaggggaatattgtgagcatgaaaagaaacagtgtgatcttcatgacactgtcgacatgttcctcgtcaggcgcaggcggttggcgtaatttcaggtgtaccaatagagttgtaagttgtaacccctgaatactgtattgttaaagcaaccttccaccttnnnnnnncta

SEQ ID NO: 6381 - DNA, 450 bp, Zea mays
aacaagccagaggttggatagtttcatatttagcacattcagtaaaatttgttgttgagagctgcgactttggatcatgggtgatcttaatcggttgattcttgcagtggattcctccaaggttggaacaagttcctgacgaggcagttgagcaatatttcttgagaattgatgatccccagtgggaagatctgaacctgcctgcgagacttccccaccgaagaaatattgagtccaagatttgattgaggtcttggacgaagagtgagcctcgatggatgctagtggtcaggataactcgtcaactcatgtttgaagttgtgtgcggaatgttgacgacgattgataaataataaacgcggactgaatatatgtcttataagttcacgtttatcgctaaataatttttgttgcttttgtgtgaagttgtacctgttagccttgttcggt

SEQ ID NO: 6382 - DNA, 369 bp, Zea mays
tttactttttattcaacaatgacaggaactttgttaaacaatgttttcttgatgtaaagatgcttatcgccgaagcagaagattaatatctgactttcaacgtacaggagatacaaagatacgaagcagcacattcctcttcgctatcagagattaacaggcccccttcaagaacatccaaaggcattttatgatgcatttgattattgcgatgtatgatatgtttcccagaagcatcatcacaaatatgttggggctttggttagtctccttgatttttccaaaggaggttgcatagggtacatagagtgtaatattttttgtttcgttcctagattttgtcaagagatggcaattatttattggaga

SEQ ID NO: 6383 - DNA, 586 bp, Zea mays
  misc_feature (357)..(371): n is a, c, g, or t
  misc_feature (389)..(393): n is a, c, g, or t
  misc_feature (402)..(402): n is a, c, g, or t
  misc_feature (404)..(407): n is a, c, g, or t
  misc_feature (426)..(432): n is a, c, g, or t
  misc_feature (435)..(435): n is a, c, g, or t
  misc_feature (457)..(458): n is a, c, g, or t
  misc_feature (460)..(463): n is a, c, g, or t
  misc_feature (481)..(482): n is a, c, g, or t
  misc_feature (490)..(491): n is a, c, g, or t
  misc_feature (531)..(536): n is a, c, g, or t
  misc_feature (540)..(541): n is a, c, g, or t
  misc_feature (544)..(549): n is a, c, g, or t
  misc_feature (552)..(555): n is a, c, g, or t
  misc_feature (578)..(583): n is a, c, g, or t
gatgtcagccggcgctgctgcctctgaccatggcccgccaccaccggtgcgcgcggagaaagagctcatgagctagctacccagtcgatccacgcgtgcccgctgtgcagtgcagcccgcccgccttatcattaattaacatggagggaacattgcatcatgatttctcttttttttcggattatgtggatgttttcttctttctttctttcttcttccattgacacgtgtgcgttaattctttttgtatgttgattttgggatttggttcactgtgcaaattgtggtaaagtcatcagggaaactgatctgttgtgtaaatcacttttttgaagcattacattctgggggaaatcnnnnnnnnnnnnnnnagaagagggtgacatcgnnnnnaaatgaatntnnnnagaatcaatgcaaattgtnnnnnnnagnagaaggaaagaagaagaaaacnncnnnnatcggaaaaaaagagaannatgatgcnntgttcctccatgttaattaatgataaggcaggcgggctgnnnnnnagcnngcnnnnnngannnnctagctgctatgagctctttctnnnnnnacg

SEQ ID NO: 6384 - DNA, 595 bp, Zea mays
acacggcgcccccctggtggtgttcgacttcgacaagaccatcgtcgactgcgacagcgacaactgggtcgtcgacgccctcggcgcgacccgccgcttcgacgagctcctgcgccacctcccatggaaccacgccatcgtaagtgccggcggccgcgcgctactgtggcagccagcaggctgcagtgcacacctctttcgcctccctcaaccgttggttaataggagctagcagcagcattcctgtatatgtatataatatatatgcacgcaggatgcaatgatgggcgagctgcactcggagggcaagacggccgaggacatcagaggcagcctcagaagggcgccgctgtccccgcacgtcgtcgcggccatcaaaaccgcctacgccctcgggtacgtacgagctgcgcgcctgcgcctgcgctgccctttggccccttcccttccctgcgagttctctcttgatcctccccagatcctcctcttcttcaggtgcgagctgcgcatcctgagcgatgccaacgccttcttcgtcgacaccatcctcgcgcaccacggcctcgccgactacttctccggcttcgaggacaaa

SEQ ID NO: 6385 - DNA, 394 bp, Zea mays
tcacagcagctgacgccgccaccgactccaaccttctccagatcgaagccgagctggacccccgcgtgtcggcgctcgaatcctcagtgcacgccctcgatctgtggtgtcctcgcgtggattcatcgatcgaggggctccacgcgtcggtggatttcatcagcaccgaagtgtccaagatggggattctatggaaccaagacgtgtgtgtcgacgacttagccaggccgggcttgttcggagcacacggatcggcggcgtgcttcgacgcgtccgccagcgcgccgtccatcccagcctcggtcatcgccgacaactggggagggttcttcgatgatggcgagcagtactgcgcggcgctggacgcgctgcccaacagcatccactcagacct

SEQ ID NO: 6386 - DNA, 362 bp, Zea mays
gcatcagatggtacctcatagatcctcaactgtggctttgctggatctttgacaaacacatactttccctcttcaaacttcatgcagatgtccacaattgacttgacgattccccacatgtttgcagtgttgaggttgatctgtgcagcaaaatcccttggcttgtatcccatcacagtgagcacagaatggttgtactgatcacgggggttcacccgtgacacatagcccaacttcatcatgtcagcaccagcaagcaaagcctgggcagtccagcgagcaagtttgttggcattgttcttgagctctgtagcaaggacagctccacgctgggtctcaagcttctgcctccagtcaacaca

SEQ ID NO: 6387 - DNA, 606 bp, Zea mays
ttggttctgcacaagtgaatcaaccaccttcagtggtagatgaatatattcttccagtgaagagggatactttgtatcttgaacgagaacctttgttagatcataacattcatcgctcaggcgtatcactttatgggcgggatccagccttgtcaacactacgaccacctggaatacatggtgctggcccgctacttacacaggtttgagttatctctggctttgtttgaatcttcatttcttttcacaggacattcggtgaataagcacaattgaattctttattccctggttattgagcatttcatacaatgatcctttttacaagttacttaataattcctactaggaagcagagcttctctctccctttttttatcttgaaatattgctgtcttgctgacaagaactatcatatgcagataacccaaaccatgcaaatcccacttacctatgctgaagacattataggagttaaaggagcaaatattgcgtacatacgagctaatagtggagctgttgttacaattcaggagagtttgggtagtccagatgatattactgttgaaataaaggggacatcttcacaggtacaggcctgcacag

SEQ ID NO: 6388 - DNA, 431 bp, Zea mays
cttgtatctacgtgtaaatcacatttatgtcaattctgatgatataaaggtcagtatagtgatagcctctctccaactccaataagttgacacagcaaaagaaatgttaaatggttaccaactggcattcgttctgattgcaagaaactggctacaatgtcgctacaatgtcgctacaatgtcagggctcggtggctgagtccgcagtggatgccagcagcgatgtggagattcatggcgagctcgagctcggtgccctcacctcttcgctcgagcaccctggcggcgcgctcggcgaactcaagcacgcgaggcggcgccaccctcgcccaataccatggcttgaggaggaagggccccagatccgggttctggagtgagtcgttggtgtcggtggggaaggcagcgtcacgaacacaatgtccacgtta

SEQ ID NO: 6389 - DNA, 359 bp, Zea mays
tgttcctgtggctgctcggtaagaccatcggcttctcgtgaagaagacggcgatgaaaagaagagaggtggcctgcgtccaacgtccggatggtcgtttttgagaggtttcgcatgtcgcggttgccctttttggggatggatttggatgtgctttgtttttcggtcatcgtggaagggctttttttcgcgtgagcctggctgttggcacgggagcgttgcgcgtgtacacctcaacgcctgtgtatgatagcgattttgtatgatgtgtgtgtataaattgtgaaccgtaattgtccttgtaaatgagcgttgtacagtcgtacactggtaatgctgttttttacaatctcgttgtaa

SEQ ID NO: 6390 - DNA, 677 bp, Zea mays
  misc_feature (6)..(6): n is a, c, g, or t
atcttnaaaactttactgagtaatacattttggtgccctgtcacagcttcaggactcatttttattttacattttattgttgaaatttaggtttcttcaaaacaggaggttgttgatgctcttgttaaaggacaattttctatggacgttgcacgggtatggttaacagcttattgagatgccctttcaggctactctatcttgttgtctccaatgaaacagcagccaacagatattccttttttttgtgttgtttctttgtttcagtgggtggctacaaatctacgtcgaaccagtccattgggtcagcgaccatcttcaagcttctcatggacttttgatctaaatggcatctctgagatgtacaagtcttatgaggatactaacttatggtaaatcttcagcgatgccagttgagatcatcaaaagaaagtatgttgtgtgactaatggaatgctgctccattcaggaggattgtagagaatgtaccaaggggtgttcatattaattttctaaaagctgaacgaagtttgcatagatgggctctcgaagacctccaaagaatttatactgcggaggaattagctgcagatgagggtggaggagttgaaatgcacgtgcttgaagatgctggacactgggtattttggcacccgccttttttttctttttttttt

SEQ ID NO: 6391 - DNA, 375 bp, Zea mays
tggcttccgctgcgcagaagaagatggcaattgtttgcttgatgctgctggccgtcgtcggccaaatcgtcgctgatgctgatgttaccgtagaacatcccagccgcatctgcaccgaaacggtgattgatcctcgtgttcccaacaacgagtgcatctgctccaagaactgcgcctgtgccggcaagtgcatccttgagtcgcctgatgctgtccagacctgctttgtcgactgcgtcctcaagaacgactgcatctgcagcagcaagatcatccccggcgctgacgacccaaaggctaatgccaagtgaagtagtactgctatcatcatccccaataatggcgtacgtacctaaataaacgacctcccatgca

SEQ ID NO: 6392 - DNA, 860 bp, Zea mays
gagataagcaacacgcgcacggcacaagagaacccaattctgaattgaatcgcaatacgccgcagtgacagtcagatcagatcatttcttttttttcttttttcttttcttggaatcatggaatgggacgttggaacggagaggaaggaatagatggaactgggcctaagaaacagaagatccaaccaagagcaattaccagtacatctagcgacagctggttgaagaggttgacgccgtcgtcctccatgtggaaccggacgctgcgctgcttgcgcagggtgcgcgtcggcgagtgcgggctccgggagcccggagtcggcgagacggcgactctcttccgcccaaaaattattgcgccgctcccgcagtttgagcagctcaagctcctggcaagggagcccttcttctcgtcgccctgtccaattgccatttcacctgttgctagctataaaccctcctgctctccgcgtctggcgattcaaaaaaaaggatcacttatccagccggaagtcggattacctgcatgggattggagataagagtcagcacccggaaaatcaaaacgaaaagcgaaaggataggcggaggcaaacagagccagcggcgaaagcgaaacatgccgatgcagaaaccgcaaccgagaatcagcagcaagatgacgaatcattcagctgtaatccaacccccaacacctctcagcaaagcatccccatccaaaaaaagaaaacccagacaggaaacggagagcgaaacagcaccatgaacaaagttggacgggtatacgaagaaacgaacgccaaatcgaaacagggttggagatcgggagaggagaacctacctattctaccgctctcaac

SEQ ID NO: 6393 - DNA, 736 bp, Zea mays
tgcatgcagcgcatcagttggtcgcttgtcctttacacagtgttatttccatgctctgaagtgcacttgattgaatcaggtctttgaagttgctccttctctgttcatggtcgatgttcgaaaggttgccggtgacactccggaataccacagggtctgttctgtttgcatctcacaccctcttactgatcatgttgttggacattgactaagttccactctggaatatgttgctggcattaataactaagtgctagatcagacgttcttttctctctctctccgttatgccttgtgaatgtgatttcagtcttgtaatgactgctaacctgcgtcttaaaccgattgcagttttacgagaacctatgcagcaaacttggcagcataatctggaggccaaccgaagtttctgccaaatctacgccgctgaggacgaccacctgctagccgcctagcccagcactgagctactgtagtggcatcaccaagagacgtgattcgcagccgtcagaaaggggggagcttctgttgaatctagcattgctcgtggagctgggattcatgttgacttttgcatctgctttctcaggtgatgatgtatgtttacagccttacaccaccaggtgtttgtatattgtagtaacgctattgtagatagtctgtatatatagctccatttgtgcagttgtacgtagcaggaatatgttaaaaaacaacttttaatgtcaggtataat

SEQ ID NO: 6394 - DNA, 510 bp, Zea mays
cccgccgagctgctggactcgcccgtcctgctccactcttcctcgaacttcttcgcgtcgcccaccaccggcgccatcccggcgcagaggttcgactggaagcatgccgccgacctgatcgcgtctcagtctcagcaagacgacagccgggctgcggtcggcagcgccttcaacgacttctccttccacgcgcccaccatgcccgcgcagaccacgtccttcccttccttcaaggtaggaaataataggaattgaattgcttgttgctgtatcacaaactactaaagctaccaaacagaagcaagtagctgacagtggtcgtcgtgcaggagcagcagcaacagcaagtcgaagaggcgaccaagagcgccgtcccgtcgagcaacaaggccagcggcggcagcggcggcagcaccaagcttgaggacgggtacaactggcgcaagtacgggcagaagcaggtgaaggggagcgagaacccgcgcagctactacaagtgcacgtaccaca

SEQ ID NO: 6395 - DNA, 369 bp, Zea mays
ctgctcgtgcgcttcttgcaatccatgactacttttcacgtttgcgcgcactgagttctctttggcttgctaggccacgagagtaacatcacccccgttggggtcactcgatgaactgatctgtgaatgtgggactgctggctgcaaactcgcaaagcatttgcagatgactggaggatcagtcctctctgtacaagttgtattaacatcttctggtctcatattgtgctccagtgttgtacaatttagggaaaagcttggattaacttgtaagttatcatgaatttgttattggcatattgtacaattgtattagcaataaaaatagaagtacataagtgctggaagcctggaaggatatccagaatc

SEQ ID NO: 6396 - DNA, 599 bp, Zea mays
tatatcatcccgtcaatttccgtggtatgtttattctatgatttaccgtgaaatccatgcgagtttaatgtgatttatcacaaagttgtttccgtccaacctgggcagccgacgaatcaaccgcggaatgtaactgttgtcgttgaaaacccaatgacagtagatgacaagggaaaattggtgagcatgttatgctaataacggtgcctctgctatgcccgacaaagtagtgaaggctgctgattttagttttcctctgtattgcaggtgagcaatgttgtagtaggggttacgagcggcgggaaaaagtgacggcatatcacaaccgtgtgtagctttgtccaaactatctaaaaagggtttaagaatacataccttgtatcatactgctgtttggcgatcggctgctcgacagaggaggaattcccctccctggagagtgtagtggcaaagcagcgcggctttcgccactgcgatcgtgctagaacgagcaaacaaaaacgaagtgcgggtgtgcatactcagagtatatctgtagcttgttaccccttgattcttttgtatgtaatatgggctctgcctgactttcactgtgtgat

SEQ ID NO: 6397 - DNA, 633 bp, Zea mays
catcaactcatctccaaacaaacttattgggtctgatgtcagcccttccccattcttttctgccatggggggcggcatcatgtgcgcaaaagcgtcaatgctactgcaggtttgtacatgcactcaattttgttccaagctactttaccttgtagtccatttagctgcttgtgttgttacagtactaaatgaacaatcttcatggtagttttccttgcataaaatcgtttttatggtatagttaaccttgccccaatgtacttcttctgatattgtagaatgtgccacctgctctacttgtgcgatttttgagggagcatcgctctgaatgggctgaccctggtgttgatgcttattccgctgcctctctgagggccaacccatataatgttccgggtttaagggctggtgggtttatgggcaaccaggttatactaccccttgcacgcaccgtggagcatgaagaggtaatctatcgatcacagttcctttcatctgtcatcttgttaatgtccaatataagctccatctaacttgctattttcaaattccagtgcttggaggttattcgacttcaaggacatggctttagccatgacgaggttcttatgtccccggatatgtttcttctgc

SEQ ID NO: 6398 - DNA, 380 bp, Zea mays
aattttgatcgagtgacatgtatggaaacttagggggtgtttgggaacaaagtttttctgcagttttggaagaatactgcagtattctcaaatactgcagtattatatacataatggtgtttggcaagctgggtaaaatctctgttttcaaaactgaagtattgcaaatactatagttgttttaagacattctaaacttagctctggaccttagttttcaaaactgcggtattataaactacggtattgttataattaaagtatagtatagtatttcaaaaactgtagttttcaaaaactttgttcccaaacagggccttatgtgcacaagagacgctgattaaacatgtaacgtaccattagccttggtacaggatagg

SEQ ID NO: 6399 - DNA, 424 bp, Zea mays
aagggaagcacagccatgatgttccagcagtcaggaacggtagccatgctgctgccaacgccaatgggtcatcttccaccagcctaccagtaccacacagggtccacagttcagcatccagtagtcgcagagcggcagaattacaaagcgcatcctcagcttcttctatgctactaaaagaggaaaacgaaataacataggagttttggagtgtgtagccagggtaaattatatctgttctctgatccatttcctcctaggtgtgctgcttcacgctctgcgccgcagcaaaaattgggcactgcaagcccccgccattggttttagtcaagagcgagctctttcgtttgtgcccttccaaaagctgcacaccctgtttggctgcgcggtgtatgttatgttgtcattaccatttacgcccatt

SEQ ID NO: 6400 - DNA, 385 bp, Zea mays
gctcgcgcttcatgtcatcgacgagacgctgaacccgctcggcgtgctttactgccacatggtagagccaaggatgcgggtgaacccagacgacggtattatgactctcgagcacatgctgctaccgttcaggagggcgtttcgcgggacgttcattgctaatggaggctacgaccgtgaggaaggcaatgccgccattgcccgtggccgtggctatgcagatctcatcgcatacggccggatattccttgccaacccggaccttccgatgcgttttgccaagaatgccccgctgaacaagtatgataggagcaccttctatacctctgatccggtggttgggtacacagattatccatttctcgatcaactctaggatgattgg

SEQ ID NO: 6401 - DNA, 521 bp, Zea mays
agagcgtctgtgcttgcgaagaacattgactgggccttggtgatgactatctgaaacagcagacgagtcgcgctgcatacctgcagtggtgcttgggatctgtacacaatttgtctcctatagactagcgatggacgtagtggggatgattgtactgttaccgcttagggcttgttcggttagctctcaatccatgtggattgagcgggattggatgggtttgaatcccaaacaagtcaaacttcttcacaattttttccaatcccatccaatccatgtgtattgggaataaccgaacaagcccttatagtggagtcgggaaactgacacatgtagattatgttagtagagaaccaaatggagtgaagccggccgcgcaagactcggcggcttcggccatcctccagagcttgtgtagagttgcctagctttgcatcttgccggaagcagcacatcgtgtagagattggacggttttaaaggatcggtggctgggtgtaagtaggttggtgggattacaag

SEQ ID NO: 6402 - DNA, 541 bp, Zea mays
acattgcaaaccgcagagaaggcatgtagggttttttttaataacattgcaaactgtaaattaaactcttaacgttaacatgatatgcgcaagaaagacagtctcacagccatcatgtgtggttttctaaaacttaacgtgctgcctgttctgttcttgtggcttcagcagcgcaacctccagtctccaccggaggcgccaccggacctgaaccgctgtgtccctccttggccgcgtagcctgccggcaccgagcaatgacatggacgtggagacggagctgtacataggattacccggcagggagcgctcctccaaccgggactctgattgaaccacggattttcagttcgatcggctaaaaggaataagctccctgaaattaaagcatcgaagggcacacgtcaatggttttatttgcaacttttgtatgcaaacttgtacttgaaaagtaaaaaaaataaaaataaatctgtagtatgtggatgcaagaaacggctggttagctagctgcaagccttctggggcctgaaaatgaaatc

SEQ ID NO: 6403 - DNA, 511 bp, Zea mays
gagagagatttctacttttccaagctgcgggacattgagatcttgtgccaaaaccctgaggttgagcacgtgccggtgagttactgccttgcggctatcatctgaaatttttttccctgttgtatccattcttcagaactgtatcgtgagtcgtgacgatgattatgatggtggtcgtcttcttgtctcaggtccatgctatccagaacatactctacacatcagaggaggaccctcagcagcaggctccagccctgagccccatcatggaggcgtccgaggagaggccgaagcaagaggcggcgcacaagagaaagagcatctcggacctggacgagtttggtatgtcgtccagctcaaggcagaggctctccgacatctcagacgtgcagctgtgtggatccccgctgacgagtttcagctaaagaaactgtcatctctacaaaatgggtgtctcgtctttctgttggattggttcgtggtttcgtatttcatgtgttgttttggtggt

SEQ ID NO: 6404 - DNA, 389 bp, Zea mays
gcatgccatcaccttcatcctcatcctcctcactgacataccaaacctgccttcttgacaccattccagtcattgggatgggcagtggtgacactcacaatggtagctgtgtcaccagcaccctcgagaacacacagagtgtcatggatggatatcccatggatcagatatggaaggagattgaggcaccacatgcacctaacttgctgagtattgctgaagggaaagagaagacgtgcagcagtagcccctgtcatctaccatcacctgtaatgtgggactacaaatgccctgagatattctggaagatgggagatcaagaaatcatgatgtgatggaaaatgaaatcaagatgttggctgcacgatttggttatgggcttatggtaa

SEQ ID NO: 6405 - DNA, 386 bp, Zea mays
cgaatcagttttcgagccattaggggccgaggctgagttgagtgtgtgaaacttcctatggcctgccacactcagttttcttatttgtgctgcaataataatgtatacaaaacagaaatgcgatgcccacagaaacaataaatgctgtgtcttcatgaactaactggagtggttccattttctcgaaaggggcgcgtgggaatctaaggtctgttgcttgctttcctgcctctgcctgcaatattccagccatggtaccaggtggatggccaaatactctagaagcgtttgccctgggcacttgcatgtagcttgatgtgagtagtgtaagaacaaccgggtacggaaaccgttgtctggccagcagatttcaaggcgtgtttaga

SEQ ID NO: 6406 - DNA, 384 bp, Zea mays
aaagaaggaatctcttacagcagagtcagagacggctgatggtgataagagtataaacaaacagattgtgctgccgcacggaggtggtttgtgggtgcccggaagcagcccgttaccagaatcagctctaaaatcatttgttgatttcaggagaacgatgtcttcctcgacttaaggtgggcaaacatcccaatggcgctatcaatttctgccgacaacctgcattggtgtggtccagcagcgtatctcgattgatatatatatataccctgtaaatctttaaagattatataaagatttaggcttttagctagtgttggcgtacaatgtattatactagtgatatccaactctgttgcctgtagatgatcgagctgctttctg

SEQ ID NO: 6407 - DNA, 358 bp, Zea mays
tgcctattcatcactccttttgctatttgtgcacttgtgcattttgtttggtatatggttttcacctgctgaatacccctatatcatcagtaaagggacaaaacggacataccaagaagttgcaaagctagacttccctgcaaaatagtgtaatctttgaaggtagcagtgaggatacaagtgtcaaaggcttctggaaattgtgaggtactttggtatgccaatactcttgggactagttggcccaaatttctcgagtagcatctagacatataccaaatatgtatgtccatgtgtaacttcttaacatagatgatagcgactctaactataagagtaactatggctgcggacttca

SEQ ID NO: 6408 - DNA, 506 bp, Zea mays
aggatgagaaatcgaatggaaatttgtaacaggctgaaacttctcctgactttctgactgctgatgtaaggaccaattttacttgtgaggtaccattaggtttacagaataccaactctgactgctgctgtaacgttcttgatttttttccccagataatttggtggtaacctgatactgataggacgactgagcaggtgttgatgtagggtattagatttttgtccgaggggtaaagttatatcatagggtttgacatggtcgacggctacagattcttcttccaggtgcctcagccctcagctcagctcagctgctgtgcttgtgctgtgttgtttttctttcctagttgtgctaggtcctacagaagtagtaacaactacgtagaaacccccagggccttgtttgaaccgtgggggggttagcgaatggtacagctgttgtagagctgctgattgagcttcttgacagaaactgcagcgtgttgaaggcacccatatttgatt

SEQ ID NO: 6409 - DNA, 357 bp, Zea mays
gttggtagctcctgtggtttatgaaggctatcgggtactacagttgatgaggggtctccagttagctgacgaaatcagtgcgcctgactggatggtgcaaagtcttcgtggcctggtatcctggtgggtactcgtccttggaatccaattgatgcgcgttgcctggttcactggactcagttttgctagaaattcaagctatggagcaagtggtgatatgaaccaataaatcatacaagaaaaacttgaggccgaacatctttgagaacctacaatgcttgagcaatcgttttgtaacgctttttgtagctgtggtaaatagtgcagtttctcttttgctggagcaggaaccaggct

SEQ ID NO: 6410 - DNA, 630 bp, Zea mays
ttgatgtatccatacggcgcaccttcagtaaaatgtgccgtatgcaattatgtcacagctactggagtatgtcaagcctcattctttgcctacttgccatgcaaatgcaatcggtgtattatgcagagtttactgaccattgttctgaatctcaggtaaatactgtggcacccaccccatctgcgaggccaacatcagatgtgtcttcatatagtggctcatctacttctgctgtaagcccttattaacgaaatttaatagtttaactggtcattcccgaaatgtagagtgatttatcacctttttgttttcatcctgcagcctaaatctcaatctcagaatgtaactgttgttgttgagaaccctatgacagttgatgacaagggaaaacttgtaagtcttcgttacctactgacttgcatattttgcattgctgattgaaccgtcgtttgattaaattcgttctgtttgtttcacacaggtcagcagcgttgtagttggagtcacagctgggaaagagtgattttattgacacttcgtacatcattgttgtgttttctatacacgaagttggaaaataccatgtagcatccaatgatgggttgcttggacttccttgaagaacagaga

SEQ ID NO: 6411 - DNA, 442 bp, Zea mays
gtcagccctcaagttgcggactgcaggatcgatgaagggggaggagggatgtcacgggaacttgatgttctagaaggtttgcgtcactccattgatgctggggcaacctttgtgagttctgattctcttgctgaacgatcgtgtttgcctggttgacagtttcggggcctctgccagcttctttgggctttgctttaaagataaattaaattattcatggatttaggagaatgaggaaccgacagtgagtagaactatcttcgcatcgctgtggtttatgtttcttatgctggtgttcagtgtgtatatatagggtacagaatactttcatatgagcactgaagaaatcgaaattgacaatgtttcatgcgaaattgtactgcgggtatgtaaatgaagtgcgcctgacttctgacttgtagcctgtttgtgcttagctgaa

SEQ ID NO: 6412 - DNA, 301 bp, Zea mays
acttgcggtttgagattgtcgacctgcgctcggctcaatgatcaatgggactaaagctatggcagcacgtgctcccttgtgctccctcttggcagaagtatataccatagagcttgctgacgatgcgtgataggtatagtgacagcgccaagccggaaccaagatgctcatgttacttatctgacatctgcgctggtatttgtcaaagaaaaggagtaactgaaaactagcactggttatcttggatctgtctgttcggccagcctttgagttggtattttaagtaatactgtatataaca

SEQ ID NO: 6413 - DNA, 479 bp, Zea mays
gaggatgagaaatcaaatggaaattggtacaaggattaaaggctgaaacttctctctctttctgactgctgatgtaaggttacttgtgagctgccgttaggccccttacagaataccaactctgattgctggtgtaatgttctccatattttttttcagataatttggtggtaacctgataggacgacaactaaagaggtatgcatatacggtattagacttttgtccgagggggtaaaattgtatcataggatttgacatggttgacggctacagattcttcttccagttgtgctgctgtgctgtgttgtctttcttccctcttcgtgctagatcctacagaagtacaactatgtagaaacccccaggtggtgtttgaagcctgggggggcttagcggtgtggtattggtatagctgttgtagagctgctcactgagcttcttgacagaaactgaagcgtgctaaagcagtcgtgtga

SEQ ID NO: 6414 - DNA, 384 bp, Zea mays
agggtaaaatccttgttggttctcacttgcccacccagcagtccattatcggcgccttccataccagcgtcgtgggtggtcacagcggtatcccagtcaccacgcgccgcatcaaacaactcttctgttggcggggactcaacaagtccgttactgacttcgtcagttcatgttccatctgtcttcaggtgaaaccagaccgtgcacggtacccagggctcttgcaaccattggcagttccaacagcagcctggcagacaatatcaatggattttatttccggtttacccaagtcaggcaatgctgacggtatcctggtaattgtggacaagttcaccaagtacagtcactttctgccgattcaccacccatacacagctactt

SEQ ID NO: 6415 - DNA, 385 bp, Zea mays
ggttccgccaggcgcgacgatcccaatgccctctctaggatcacttgcccctacaaaaatgattggaaatccatcagctatgcaggggtacccagggcttatgatgccaggagagccaaaggtagagcctttctcgcgaccacacttcccaacgtcaattgcacctccgccagcttaccaacagatactgagcaggcctccttttggtcatcagatgtaaataataggaaggggatagatttgcttcggcttgtatacatgatagctacgctgcaacatggctttgttctagttttgttgatggatcgtccgatttttacttctttttaaattttcagctcacggctcacgcatttctttgaagcaaagatggctgaggatgata

SEQ ID NO: 6416 - DNA, 507 bp, Zea mays
ttccttctttcacttgttggtcatggccattaggttcgccctctggaggctggagctactgtgagtatagcatttttcaaactgatctcatattcactcttgtgttttcctcttgtcaggctatgtttcgaccatgggacatgatatttctatcgatccaccctaaatgcagcgacctacctggaaaacttatgatgttgccatttatctgtcgtgactcctggatctaactgccacatatcacatatgcggttcctagtatgcttgtttaaagtattcgtgtatatatatttccatctgggtttcttgttggaagattctggatggggcaccagatcagctgttgctggtcagtggtcacagtgggcttgacttgtgtctctatgacgccaatattattatgtcatgttcttgtggtatttccttcatttgttattctgtttttcgctgcttatcccatatccctgttttctccgtccttcacggagaccaacgtcttaggacata

SEQ ID NO: 6417 - DNA, 433 bp, Zea mays
  misc_feature (420)..(420): n is a, c, g, or t
gagcagccaagctcgaccgcttccccatcaccattagtgatccaatctcagctacgttcggtgaaccatttgagaaagccaacccaagccattcctccacagcaatcgtttgtcgagctggttcaggaattgatatggttgttggccttgtttcttctagtctaggtgctgttgctagtggccaaggcaatttcaaagtcttagtttgggatcctggtggttatgcatatcacagcttggggacaagctgtatttcaagcggtggggaatgtcagcatctcagacaggagcaatgagcagacaacgagaacaagccacggcacgtgagagtccatcgtccaaacgccaaggttactgagccaatatgggccaagtagtgggtcagctatctatgggtcgcttgatgttcgagtagtacantgttcgagtagta

SEQ ID NO: 6418 - DNA, 605 bp, Zea mays
ggagaggaagaagtcgtacataaaggacttggagacaaagagcaagcacttagaggcagagtgccgtcgcctcagctacgcacttcagtgctacgcagctgagaacatggcactgcgccagagcttgctgaaggataggcctcttggtgctcccacagccacgcaggagtctgccgtactcacgggtaagacatgttatccgtcctctaatctttattcattccctgaaattagatgaatcgatttgtctaccatcagtgagtcctctctggcttgaaccgtggatatggtaggtcagtcataaattaccaagcaagtaaccaatcaaaagcacaagtgcaaccatttttttttggttagaatcttgcagtttgaaaggctggtgaagtaattcgtgatgctaagatgaattttctttttatgtgcagaaaccctgccgctggtttccctgctttggctggtgagcatcgtctgcctgttcctgatgcccgttctgcccaaccgaagtccagctgctccaagcagcggcggaagagacctcgtgatggcagccggaaagacaagcagtgagaccccagagatactggaactcatcctccatggaa

SEQ ID NO: 6419 - DNA, 348 bp, Zea mays
cctttgggaaaagaagatgaaacctgttacagagatagtggctgctcaagttctcgaggaagcaacagaggaagaaattaacatagttgcctcccttgccgagaagtgcttgagactccgtcacgaagaaagacctacaatgaagctagtggaaatgactctacagtttttgcgagcagagcggttgaactcaagtagtgatgttcctgcaagcaagcaagaggtggaagagcttttgggtacaagcgcttcctattccgactcattgggttctgacaatttgctggacaataaagctgctacaacatcccaacaatcaaagggatattatagtttggagcaggagtt

SEQ ID NO: 6420 - DNA, 306 bp, Zea mays
gctggaatgggaagcagttgaagaggaaggtcaggggcaccaaagtcgcgccagctgttctggcttgcccatctgcgctggtctaatggtggagctggctcattagggtcgtcttcctatttttatccatgttacagtctgctggagtgttgacaatggttgtgtgtcagggtctgttcccttttggtagttttaaaactaggccttcctacaagtgtgtggaacgtagtaaggtgtcagcttggggggagcaaaatcagttttctccctcccttcctgtcttgtttctgtccctggctttgtact

SEQ ID NO: 6421 - DNA, 493 bp, Zea mays
gctgaggaaggtcgctcgccttcagatgaaggatgtggccgtccgtcttgccgaaaggggcatcgctctggctgtgaccgacgccgcattggacatcatcttgtctctctcttacgatccggtatgtgaccatccatgatttgatccatctgaattcgtcggtgacacacctgatggtgctgagtgctgactctctctctctcttgtgtggcttcaacaacaggtgtacggcgcgcggccaataaggaggtggatcgagaagagggtggtgacgcagctgtcgaagatgctgatccaggaggagatcgacgagaactgcacggtctacatcgacgccgcgcccggtaaggacgaactggtctacagggtggaccggagcggcggtctggtgaacgctgagacggggatgaagtcggacatcctgatccaggtccccaacagctccaccaggagcgacgctgcgcaggccgtcaagaagatgaggatcatggag

SEQ ID NO: 6422 - DNA, 390 bp, Zea mays
ttcgccttcgaggaagaggttgtgaagctaatggaaaccagcatcacaagcgcaatgcagtaccttcagaacaagggactctgcctgatgccagttgcccttgcttccgccatatccacccagaagggcgtctccgccgcgtcaatccctcccgaacagtgaaataaagacatgctgctgctcccatgagtacgaggaaacaactgcagaagacagaaaactcaagatggctgaagaatgcagcaaagcccgtatagagtacagggtaggaagttagtctgaccagtgttcatgacctcatctactaatttgcttttcagaatcagctttttggtatctattgcgcataagttggtttttccttttcccttgctctgtctctctctctca

SEQ ID NO: 6423 - DNA, 363 bp, Zea mays
gacactactgggcagtcaccatgcttggctggactgcgcttgtgtttgtcttgagcttgaagcgcacagggtctatggagctgagttttattgagatggagccagtgacggacccctcgctgccttctgttggtgtggtagccaccagaaatggtagaagtagaactctgcaaatggatgccttgtccggaagaagagttgcagacattgtataacacgcagagaggaaatgtttgaggaatcctgagtttttgttctgaaaactgtatcatgtcgacacaatgatacgtattgggtttggaattctggtgtcgctgatgtctttggtcattgctggtgtaaaggaattcttcgtcttggcct

SEQ ID NO: 6424 - DNA, 373 bp, Zea mays
ttcaggacgcggtggagtttcacagggcaagcaaagcaccggacgagccgctaaaggcgcccgagaactcttcgaaggcagcagaagcagaagcctgaagctgcactcgggtcacgcttactcgttttttgtacgtgtcgaggaaggagctgagagatactttctgtcattgccttcttaagaatgttacgtcatgacaatgacatgatgtcctgagcactggtgctgttgttggaacagtgggtagccttgacgaactttcattagctacagtcctaatctagagttctggagacgagactcgttagatttattcgcttgtcttgtgctccgttatgtttgttctatcggttaagctatgcgtcatgtgtta

SEQ ID NO: 6425 - DNA, 371 bp, Zea mays
catgtgctgagccttgaatcaggtccgaccatggtgaaggcccggaccatgtggaggcctaagggaaccaaggcccaagaaacagttgttccatcttcaatttgaattgtgtgagacgttcgggatggtgattttggcaacaaactactactatttggcaaaaagatcagaatggttactagcgtcctctattggaagcaagtcacacagggcgagacctaaactaatttaattatgaagtgtgaacaatagaggagatataaatagtgtgaacaatgaactggaggagacagaagcggggggagatcgaagacaagggaggcctcatgtgcatgacaatcttcggtcgcacaaatgggtgttgtaagtat

SEQ ID NO: 6426 - DNA, 414 bp, Zea mays
agaacatagcgatttgcagatgcatcagactgctgctatcagtcgacgcctctagcacagtctagtgctcagttgctcactcgatcacaacctggtacggaaagaacacacggggtagctgctccatgcccaatcctaaatcaggcacaggcaataccgatacgccaatactagtactgatttaagaatagcaagcatactactagtgcagtatgtgtctggtggttttccgttccctctattttcttcgaaaaggcccgtatgcatgcttcacaactcggcccacaagagcggctcgtgcatcccgacgacggcgtcgcagccgtcgtaatgctcagcggccattgccgccggccaccacagcccgtcccgcaggtcgaggagaaggtcgggcaggtcgaacagcgtgctctc

SEQ ID NO: 6427 - DNA, 429 bp, Zea mays
attccacctcacaccctcaggttggctgcaacacctccgacaatgacttttcctactagggcctagattaccggcccctctccgcttaccagagcctcctccacggccgcatcatcaacgcctcactccccgaggtcgtcgctctctgctcctcccatggctatgaatctaaggaattgtatacgccctctccagtagattcttcctgctcgttgtgtggcaaattgtgtgttgttaagacttgttgttgatttgtccgctaggaagttgctgaagcggtggacggttgttggtgttcttcctagctgctctgaggtctgtgtgggcgtacatgaaatttggagtgagtattagtggagaggagctacgggaggggtggatgtggctgctagccatggtcctcatcagtccttgcttggtattgatcga

SEQ ID NO: 6428 - DNA, 842 bp, Zea mays
gcctttcatgtaaggtgtgccctcctcgctgtcccgccgcctcttttgttcccacaatctacagacaagttcatgactactccaggattaaaggcgagtagtgtggccaggtctctcggcatataatttcagttcgacagacctcaggaggatggtgcctgccctggcgtagtagcaccgatgagtgatgaaggaggcgtttgcaccttttgtgcttctcgctagctccatgccttcggctgacgattgtgtaaggctatccgcactcattttaccttatttctctactctaaaaggaatattctgtcctggtcagcgagattctttaccctatactaaaatcatctgcagccatatttaccctatatctctactctataccaaccactacaatttttatttccaatttaatattcccccctctctcgtcccatggcgggagatggagccgttggccacgtgcacgaaagagaagaaaatagggtaggagagagaggacgctggatatgaggtaagagaagagcaaatttacggtagggatgactttcgagttcgcgagtgcagggcttcagtctactctaaatatttacggtaccttttcgcgtttgcgagtgcggccagcctaagggtgcagccgtgtgcagtaggcttctgaaaggtgatattggtctgcggcctgatgtgtgtacatataatttttgccaggaagcgtgcacccttcctggcctttcctatccccaaaagctcggccatctaggctcgtgaaatgctgcttcagatcaaggctgtccttggaaatgggaagatgaaaggagaatctgggtaatgccggttgctccctt

SEQ ID NO: 6429 - DNA, 518 bp, Zea mays
tatcccgcaacaaaatagggcctaacggtgtcgaggtcagtaatgaacctttcgttagctctctcacctttatggtttgaaaaatatgcagtttctccacctttttctttctccttgacttgacctgatatttgacatttcacttttctcagatacctgggctcattaaaaaatggcagcagtagacataatgtacaagttaccgttctggaaaatgttcaggaaaatgatgagtaggtctgcctatccgagttctcttcatatcgaattaaaaaaaggttcaagatgatcatgcgatcgttaacaatcagtcattggtttcgtcatctgttggcaactctcccatgtcgcttgagttgctttgtttctgacatcactctgcgacctgccggcgtcttttgtacgagggttcttgtatgtttttaggtagagctgagtgcagtgcgttgtaatgctttccgtgaggttactatactgctatcaagattcaagcaggatcagctcgttatgacagctct

SEQ ID NO: 6430 - DNA, 378 bp, Zea mays
tccctttgagccccgagatggaggtctcactcgttgagcgtgatctacggtttatctccttcagcactggtcgtcgcggctgcatcgctgcagctcttggcactgatatgaccatcatgctcttcggtaggctcctgcaggggttctcttggagcaagatgaccggggtggcggccatcgaccttagcgagtccaggcacaacactttcatggcacagccactcgtgctacaggctaagccacggcttccagcgcacctctaccccgggatcttgctttgtaagtagtcccaaattgcggctgagcatgtagaaaatttcaccacttatacaggcttaaaatcgaggaatgagagaaagcgcgagaggaatagaaaac

SEQ ID NO: 6431 - DNA, 382 bp, Zea mays
ttttgcacggtgtcacgatacggggttcaaatacaagacgacactaaacagatgcaaactgtattcgcttctaatttgaagcctctcatcgattatatggccctgattgctgttacctcctgcctggcctgccctgccccctgagtctggtcaatgaccatccttgtttgtgatgcccctcccgctgttgccgtcgtagcttttgtagagtacatgtaaagatccttgtaatggcgaaatcatatgttttgctcaagaaatatatagtgtcatttgttctttttttttggctcgctaattttggacctttatccgtggacagtcttttgttgacgttggcgctgaagttgataccgtcgcaggaacctgtaaggatgtaact

SEQ ID NO: 6432 - DNA, 398 bp, Zea mays
cgctactctgacgaggaacactctgatgaggaacacaggaggtcacacaagcatcggagggagcatcactccagttctaaaaggaagcacgaggaagactgataccaggttcgccggaagtgtctgtctagatcaggtgccaagtttgaatcagacaagctgtctgatgacactgcacaaatcaactcagggaacaactgaagcgccgagtaaactgagagcaaaaatcagagcaacatactgtaatattttgtatcacagcagtaacattatgtccttaggcctctgttttgtagccaattgctctttcgatttctgtatttgtttcgaacgttctaactaggtgtctgtccatcttatttgaaatcagtgacctgctcgccaagttctaactacat

SEQ ID NO: 6433 - DNA, 357 bp, Zea mays
tcgacaacaatgccttcggcatgcagaacggcttcggtaacatggtgcacgggcagaccatgaccatgaggaacggcattggcagcgtggcgaggacggtgaaggaggacaactattggtttaccgacctgaatctggatgatctacaggcaccctacaacgtgacccatgtgttgaatccgaaccctgttcagacgatgaatctggcagctgggcaaggccatggctacttgcagtctatgagctcgccgtcgacgaagatgtggcagaccatcttgcctccgttctgagagttgctgtgatggaagggggaagagatgatcttgggcgtaggagtggttagactggctaggaaca

SEQ ID NO: 6434 - DNA, 400 bp, Zea mays
ggctggcgaagagcggctcgctccggctgcgctccagcgacgcctacacgatggacgtcggcgaagatagtccgcagtggaggcagctggcgacgaccggattcccaaacgtcggcccaccgccgaggctcgatcacgttgcggtgagcctgccctgtggacggatcatcatattcggtggctccatcgcgggactccactccccggcgcagctgttcctggtcgatccagcagaggagaagccgacgtggaggatcctgaacgttcccggcaaaccccccaagttcgcctgggggcacagcacctgcgtggttggcggcactagggtcctcgtcctcggaggccacaccggggaggagtggatactgaacgagctacatgagcagtttagtcgtaccgt

SEQ ID NO: 6435 - DNA, 350 bp, Zea mays
atgtaaggcagtacttgtggttgtttgaggagcataatgtgatggagtttctaattcttgctggtgatcgtctataccggatggactacgaaaagttcatttaggcacatagagaaatatatgctgatatttgtgttgtggccctaccaatggatgagaaacgtacaactgcatttggactcatgcaaatcgatgaagaatggaggatcattgagtttgctaagaaaccgaaaggagagcagttgaacgaaatgatagttgacaccaccatacttggccttgatgacgtgagggcaaaggcaatgctttatattgctagcatggatatctatgtttttagcaaagatgta

SEQ ID NO: 6436 - DNA, 368 bp, Zea mays
gagccttgtgctcaacaaaattttgtggaagagaataatctcactgatgttaagacagtcaatgaagataagagtgatgatgtaattgctgatgctgcagctgctgcaagatcagcacaaccaactggcaacaccttcttgactacaaaagtgcgcacaaaattcccattccttcttaagcattctcttcgtgaataccagcatatagggctggattggttagttgctatgtatgagaagaggcttaatggaattctagcagatgaaatgggtttaggcaagacaatcatgactatctccttgcttgcgcaccttgcgtgtgagaaggggatatggggtcctcatcttattgtcgtgccgactagtga

SEQ ID NO: 6437 - DNA, 549 bp, Zea mays
acacaacattgcaaaccgcagagaaggcatgtagggttttttttaataacattgcaaactgtaaattaaactcttaacgttaacatgatatgcgcaagaaagacagtctcacagccatcatgtgtggttttctaaaacttaacgtgctgcctgttctgttcttgtggcttcagcagcgcaacctccagtctccaccggaggcgccaccggacctgaaccgctgtgtccctccttggccgcgtagcctgccggcaccgagcaatgacatggacgtggagacggagctgtacataggattacccggcagggagcgctcctccaaccgggactctgattgaaccacggattttcagttcgatcggctaaaaggaataagctccctgaaattaaagcatcgaagggcacacgtcaatggttttatttgcaacttttgtatgcaaacttgtacttgaaaagtaaaaaaaataaaaataaatctgtagtatgtggatgcaagaaacggctggttagctagctgcaagccttctggggcctgaaaatgaaatccac

SEQ ID NO: 6438 - DNA, 525 bp, Zea mays
taagtcaagtgctgataggttgccaggctaaaggtatcagagttgcttgcaacctgccagagagatccatgaagcaaaaggtttacggggatggtatccgactccagcagatcgtctctgacttcctatttgtttcggtgaagttctctcctgctggtggctctgttgacatctcttccaagctgactaagaacagcattggggaaaaccttcacctcatagacttcgaacttaggtatgctgggcatgctagtttgcaagcatacattcatttctgaactggaaagcatgaggtgtgaaggcttaagttactcttgtgtttatggctttatgattttcaggatcaagcaccgaggagcaggagtcccagcggaaatattgtcgcaaatgtatgaggaggacaataaagagcagtcagaggagggcttcagccttgctgtttctagaaaccttctgaggctcatgaatggtgacattcgtcacctcagggaagctggcatgtcaaccttcattctcactgctgaa

SEQ ID NO: 6439 - DNA, 914 bp, Zea mays
tatgtgatgtcacttcgcttgcttctcatttttgtcttggagatggtaggagtctttaagcttgaactattttttagggactcgcgagatcaatgccaaccagtggtgctcttgatcgtgttgccgagaaattgaatgttccattctttgaggtaccattgccatagagcttcactgttcattgtcatatatacaaactgacaaagtgttgtaaacctgtaatttctacttgatcatctaagactaagatgccacttcttaggttccaacaggctggaaattttttggcaacctaatggatgcaggaaaattgtctatttgtggagaggaaagttttgggactggatctgatcacatcagagagaaggatggcatctggtaagaagtaaattacttatcagctgtagattttgttaatcaattttttctttgtaagttctaaacagagaagctttggacatcattcatgtttctgtttgtgtgaaatgtctgtagacaacttccatactcttatcaactcttgactctcagggctgttctggcttggctttccatacttgcacaccggaacaaggataagaaggtcggagagagattagtgtcagttgaagatattgctatggagcactggaaaacctatggcaggaatttcttttctagatacgattatgaggtatttaatcaaatggtttcctgatattacacttaaggccatatatcttggaaccacctgatcaaatttcttgcacagtcatagtaatctgaatttgccaagaataatttgagtgcatatttcttcttaattaaaaagccacctaattcctcctaagttggctgagtttttttggtttaaccaatgattttgtaattctacaggcgtgtgaatcacacagtgcaaaccagatgatggatca

SEQ ID NO: 6440 - DNA, 413 bp, Zea mays
cacgggcctagaccagaagcagatcaacaactggttcatcaaccagaggaaacggcactggaagccgtcggaggacatgcctttcgtgatgatggaaggcttccacccgcagaacgccgctgctctgtacatggacgggccgttcatggccgacggcatgtatcgcctcggttcatgaactacacacttccatggacgactgtgtggggcctatatatccaatcgtcggaccgtgggagtatatttcagtgtaccaggaccaggatgcgttgcagtgcaaggacattgttgtggaatttttgttgctgattgccaaggggtgggtcggtcgatgtagcgtctatgcatggcttgtagttctcctgtaatgttgttgttaatttccgcttggcggcttgtaatcttaggtgtat

SEQ ID NO: 6441 - DNA, 391 bp, Zea mays
gttggcccttgacgagaagagcttcagggtcattgcattcagtgagaatgcacctgaaatgcttacaacggtcagccatgctgtaccgaacgttgatgatcccccgaagctaggaattggtaccaatgtgcgctcccttttcactgaccctggtgctacagcactgcagaaggcacttggatttgctgatgtttctttgctgaatcctatcctggttcagtgcaagacctcaggcaagccattctatgccattgttcatagggcaactggttgtctggtggtagattttgagcctgtgaagcctacagaatttcctgccactgctgctggggctttgcagtcctacaagcttgctgccaaggcaatctccaagatccagtcactaccaggt

SEQ ID NO: 6442 - DNA, 339 bp, Zea mays
tttggccagcgcgctggcctgattcggcttttttgccgacgagccggaaatagcattggggcccaagtgtttcgttgcctacccagtaccaacaagtccacaaccacaatgctcgggttactaaaaggtcgataaaatacccaaaaaaaaaacagtcaaagacagtgttcgtcgaaaaaaaactaaggaaaaacaattagtagtaaaactgaaaatacctttaatactacatggcaccttgaacggcatgttgttgtcctttatagatcacgattactgtggtattggggctattcaattattcttccacgaaggtgtgtaagcgtagtgtgtctcttc

SEQ ID NO: 6443 - DNA, 402 bp, Zea mays
gctctggagtttctaaatgagctgggttggcttcttcacagagcgaacagaatgtctaaagagaatgtaactgatacatctgtagctacctttagcatgtggagattcaggaatcttggtgtatttgccatggagcgggagtggtgtgctgtgatcaaaatgctgttagatttcttatttattggccttgtcgatgtgggatcccgatctccagaagaggtggtgctttcagaaaatttgttgcatgctgctgtacggaggaagtctgttaacatggttagatttctgctgagatacagaccaaacaaaaactccaaggggactgcacagacatacttatttagacctgatgctctgggcccgtcaatgattacccccctccatatagcagctgccactagt

SEQ ID NO: 6444 - DNA, 1240 bp, Zea mays
  misc_feature (755)..(755): n is a, c, g, or t
  misc_feature (1207)..(1208): n is a, c, g, or t
  misc_feature (1213)..(1213): n is a, c, g, or t
  misc_feature (1226)..(1237): n is a, c, g, or t
tactacaccactgacagccttgcgctctgcgcgttggagaaagctaacaagtaaatattcatcgtatgcgcagaaccaacttatgctcgagtcaatttcggagctccaacggaaggtaaattcgtcgagcttgcttaaagttggccgttggaacttcctttttaagaaatgtaaggtttctttagctgggcattaggtgggcatggtttgttgcaagtattgactgctctggttgcctagttacatccacaaaatattcctgctcttgtgctgtgctgagtattggcatgcgatgcattgccgcaggagaagtcgctgcaggaggagaacaaggttctgcagaaggaggtagccagacgccgccgctcctcaacactcagctagccctctgttttctcatgacgcaaattaaatttacagaaagcgttgctcctgcctgcagctcgcggagaagcagaaagcccagcggaagcaagtgcaatggggccaaacccaacagcagaccagttcgtcttcctcgtgcttcgtgataagggaagctgccccaacaacaaatatcaggtagagcacattcacatcgcgctacaagcctacaatcccaaattgtgaggtggcctcggtttcgggtaaagatttgagtgagcttgggctttatctaaaccccaattcaaaaatacacataaacttgtgcttttccaaaatttgtagaaaatatagatttttgtagaccatgcatggaacaattatgttgacanacaatgttcgttgaatttttttttgaccatttatgagccccaaagaaaaagaaaaaaaatttttcacgttatgatagaatcctgtttttcctttcccagaaggtacgagggcaacttttttttttctacaaaactccgtgtgtcagtataattaatcatccatctagctgtatgcgtttctccgataaattttatgcttgtggtttttcttttgtatgttttttttcaaaagagtagccgtacgcctatgctcaaccaagctacacccaatttcctagtacactgttgacatttcaggaagcaactgacaagatagtctccgtctgtgtccgtttctttgcagcatttttcctgtggcagcaggcgggaggttggtggaaggtgcagcagcgcagccacaggctcgcgttggactaccaccatggatgcttagccacctgagcagcgaagtnncagcntcaaagagctcannnnnnnnnnnnccc

SEQ ID NO: 6445 - DNA, 810 bp, Zea mays
gtgttgacaatgaaattgtgctttgggaaccgaagacaaaagaacagagtcctggggaggtaattcagtttcagtttaactttcccagaattgtattcctattataatgccatatatttacgcacagttgtaaactatttccagatccttagatttcaaggtactggctgccaataataaatatgttccactgaagtaatatgattttctgttgcctcatagggaagcatcgatattcttcagaagtatcctgtcccagaatgtgacatttggtttatcaaattttcatgtgattttcacttcaatcagttggcgataggtaatatctctcatcaggattgtttctggtagaagttttatttaagatttttttttgctctgtaaaatttcacacacgcacgcgcacccccacccacctgcacgcgcgcatacacacacaccgcacacacgtacgcatatatatgacttttttcccacaaatattttctatgtcagatatcagcaaataaatttgtatgtttgattatatttagagatataggaaaagttgagtgctctaatacccatccactacttcaaacaggcaaccgtgaaggcaaaatctacgtgtgggaagtacagtccagccctcctgtcctcattgctcggtacttttcactgcaagagtttcagttattcttgtctcccacttgtatcgtcgcatgcttctggatgccaatgcttcatcattttcaggctgtataatcagcagtgtaaatcgccgataagacaaactgcagtgtccttcgatggaaggtacctcgctctaat

SEQ ID NO: 6446 - DNA, 325 bp, Zea mays
acatgtaaggtccattgtaaaagctccatctgatgatatgaagaagatacaggggctacttgaactgagaacagttacaaatgagatggtccgcttaattgagacagcaactgcccctgtcttggctgtcgacattgccggtaacataaatggatggaacaataaagctgcagaactaacaggtttacctgtaatggaagccatagggaggcccctgatagatcttgttgttactgattctatagaagtggttaagcagattttggactcagctttacaaggtttgtcactttgctttcagtcgatttttttgtggtccccagct

SEQ ID NO: 6447 - DNA, 425 bp, Zea mays
gtttgcagtggcggtggagttggtacaattgatatcagaatcctccgtgagcaggagccaagaatccacttcctcttcttcctccctgataccatcatcggtagaaacaaaagctcttccctcatcaaaaccaggggctgctggaatagcagcagctggaagttgtttttgatgaaacagcagctggaagtggcagcacagacactcgctggtgtctatgtgtatttgcagagtgcacctttgcatcacaggtgctaaatagtgctggtgcatctgcacagcatgtcaatactgtgggtgcactcttgcatacctcacatacatgcacgcgctcatgacatgatgccacttgattagcagaatgaacctgtttattgcatgacgtgcaaagacactcagcatcagaatggcagtaaaccatgctt

SEQ ID NO: 6448 - DNA, 827 bp, Zea mays
  misc_feature (820)..(822): n is a, c, g, or t
tgaataagaaagtcgtccttaatcttactgctcctatgcaattggtgagatgtctctatatttttatatttgttgcaattaagacatagctatgacattaatctttttattgtttcatgtatgccttattttgtatctcaggttaatgagctgaaggagaggatgctaggctctggaatgccctggcctggtgatgaaggcgacaagcgttgggagcaagcatggatggctattaaaaaggtaccctgatctaaaattaatactagcatccataagattcggcacatccttgtgggtcatctgcttagaaacaccaatggctttaactttaagggcatgttttgtgcagtggtgagaactgtctcactaagtcaccaggttgtaagttcaaaggagtctttgtatctgcgggaagggcttgcctcggtttgtcccttccaatccatagacccctttcatgtgggagcctttggcactgggtctgccctattttcttttttgtcttcattcatgggccatttgatctcatatattgtagatagatctattaaaaataagcaacatgcatggaaactgaatgtaagaaaaaaaatccaagtatgataattgaatatctccatttcctttttaggtttgggcatcaaaatggaacgaaagagcatattttagcacacgcaaggtgaaacttgatcatgagtacctttcgatggctgttctcgtgcaagaagttgtgaatgcagattatgcttttgtcattcataccacaaaacccatcgtctggagattgttcatgagatatatgctgaagtgggaaagggcnnncgaga

SEQ ID NO: 6449 - DNA, 367 bp, Zea mays
tcaggcatttcttgaagtggttaaaagcagaagcctgccatgggagaatgcagaaatggacgcaatacattccttgcagctcatattgcgtgactccttcagggatgctgcagagggcaccaacaactcaaaagccattgtcaatggacaagttcagcttcgggagctagaattgcgggggataaatgagcttagttccgtagcaagagagatggttcggttgatagagacagcaacagtacccatatttgcagtagatactgatgggtgtataaatggttggaatgcaaagattgctgagttgacagggctttcagttgaggaggcaatgggcaaatctctggtaaatgatcttatcttcaaggaa

SEQ ID NO: 6450 - DNA, 683 bp, Zea mays
gctctcacacttttgtatttttaagtttattgcctgaaaatctgttctgttttttgtgttttctatcttgagttgctctaccaacatttcctagatgagtgcatccaattttttttagttcctgtattaactccttaccttattgctgatgtgcttctttttggttcttatatttatgttacctgtagattgctgaattaaaggaggctgagaaagagcatcagaaggagtcagaaaggatagagaaggaacttgctgaaatggaggaaatgagggtaggggatattcttcagtgttcatataattccatttccagaatcattagcatttatcgtcatttttaaagacaccataccctttcgctttaatatcttgtttatgtgtacagaaaaagatcagtacaatgacagcagatgattactttgagaagtaccctgaactcaggaagaagtttgacgatgaaatccgtaacgataactggggatattgaagagattggagagaactcttatgatgccatttccatgtccgtgaagaaccaataattttcctgtgccctgaattgggtggtttccatagcatgtgcacggggtttgggtggaatgcctacagaatcgactgtgtcaagctttcttgattccgtagaaacatgttttgtttgacctcatcatagaggatctccg

SEQ ID NO: 6451 - DNA, 391 bp, Zea mays
ccttacgcccctccagtctcggtcttgccggcacagattcaagctaacgcacccccatctcttcctctgctggcggtctctgtaaacccgccagtccaacatgtttcccctgtgaataaccttctgaacagagcttcagtgcatcagcatggacagcagcaatacgctttgttgtctgaccctgttgccacgcccttgcatcaacaagcagcggggagcaaaccagctgtagcagcacatccgtcgttgcctgagcctaatgcatcatctcacacagcattcccttggcaatctaatgctgctgacatgacccacgctggacggaatgcgacggctgatccatgggccgccgcccgcgcagctaactcgtatagtacagcatcagcaggca

SEQ ID NO: 6452 - DNA, 421 bp, Zea mays
acactttggtgagggagttggattcagtggcgggtctgtggaggtacactcttcggtataagcaggctcgattgcggaataccattgcgatggactcctgatcttgttttctgcctgtttattttttgctcattggataggtgctggcagctacccaaacagctggggaatccggaaagaaatggttccagggaacagcagatgctgtcaggcagttcctctggctttttgaggttcttcctgggccatgtgtaatactctacctttcagagtatgctatcactatgtccaattaactttttgcctgatgttattctgtgaaggatgcaagactcaaatgtatagaaaacatactgattctgtctggtgatcatctgtatcggatggattacatggattttgtgcaggtctcctatctgct

SEQ ID NO: 6453 - DNA, 624 bp, Zea mays
aagggtagaaggtataaatgtatgggagtcagaaaaagactaagtgttacgtgaatatacctgcatattttttgacgagtgtgccaacaaatagcacaatctgtggggaattctgcccatcttcgtatatgcgctctcctgggaatagggtggcttgggcaccccacaacacgacattgaccgaagcacctctgttgtttccagttcgagcatggaacatgagtcacaaacaatgtatatgtaagacaacgccaaaatacataccatacatctagcagaacacaaggtaagaacaaccatgtagtccaaaccttgcactgcatatggaaatgttcctcttcaagctggaagcttgttgtcctttggagcgatgtggcgaaacattcgagactgaagtaactatcccaatggcatctgctttcaaacgagcagtatatacaatattagcaaagaaaaacaggcgtcttaagtatataggtaacaacgtttacctgtatagtagtctttatggtcgatgcgcgaatggatctgctctatgtgagtgagggagtaggtaagtgtaggaaatgcaggaggaatctcaataacctgctctaactttgtccaattcgtgaaggtaatcat

SEQ ID NO: 6454 - DNA, 778 bp, Zea mays
cggggagaacagaagctgcagcaacagtgctcatcatcaacacctcgatcaggtctcaatatcatatccaccaccagccggcatagctcctgctggtaccacggcaagagaaagagagatgacgacgacggctaataacgggacggtcacggatatacaggatctcaggaagtctaggctcagctggaccatgcagctgcaccgccagttcattgcagctgtgaattccctgggggaaagtgagaatcacattcatttcccttttattatttaagcatgcatgttcgtatattttactactaacctatatagtttgtacgtacgtagtgtttctttagttaattattcgtattagttacacgctttggtttacagaggcagttccaaagaagatattggagacaatgaaggttaaacatttgacaagggaacaagttgcaagccacctgcaggtaattatcatatgtattctaatatatatgttcttgtaaaatacatatattgatgccagatgaatgcctcctagctagctagggtacgcacactatacacggtggatattgtctccctctttaaaaatccatatgttaatgtgaacacaaactaataaaattacaattattacgcatgtgctaagctaagctagctcaaatataattcgctgaaatacatatggatcgttatttcatttattttacatatacatactcccgtaatataattctgttgcttaaagatgctgccgccatttaaaaaaaaactgatgcagaaatacagg

SEQ ID NO: 6455 - DNA, 423 bp, Zea mays
gtcagtttcacctgttttgatgagtgacgagcagcaggtcgatgacgcccattctgctgtcaaggccattgagcacctgggcaataatctggctaacataaatcacaaatccctgcatatggatgtcctcatgttagaggacgcccaagttgcttccatggctgcagtccctgggcatgagggagaatctgtcgacgctggatcaaattcttttgatattttacttggagctctggctgaagagtccaaggcagcagatgctcctgggaaagatgaagttggcaaagcttccttgacattaataacactggctagcaatgagccctctgttacagaaggcagagttgtagacgtggtggaaacagacacaattttgggagcaggaaaagatgataaacaagttgatcaggcacatgacttcca

SEQ ID NO: 6456 - DNA, 651 bp, Zea mays
tgctgaagctgagagttatcagataaggaccaggaatgagaatgctgtcgagacccaaagccctccaaaaaatggagtgtcgttgttgtctaagccatatgttgataggagggaacagaatggtgattctgatctattggggcatggcctaagagagacaggtgtgaagaggaaaagatcacatcatgacgtggagcaaaacgatgatctgtctgattcctctgttgaatctttgcctggaatggagatttctccagatgatgttgtcagtgctattggtcccaagcatttttggaaagcgagaagagctattgtcaagtaagtatacaaaacttgagttcatgttcttggtgtttttacctattattgaacgtcctgtgtgagcataccatctcggcgactcctgtaatcagatagtgtttacactcgcttttgtttaacgtgcatacagtcagcagagggtatttgctgttcaagtattcgagctgcataggttgatcaaagtgagtctgcggcaaataaatataacttctttgggcccatgcttatgggcaggttaatttaaatttgaaaatttggtttaacggttgtttatgttgacttttgcaatcaggtgcagaagttgatcgctgcatctccacatgtacttat

SEQ ID NO: 6457 - DNA, 610 bp, Zea mays
tgggagagcttatcaagagaccgaacttgtcaactgcaaaagctgaagtgcgtgacttgaatctatcttttccggacagggctatactgtagcaccctaatgtatttgctccgtgtcttttagggtagcatgtaaagaggccctaacgagttacaacagccttgataacccagccgcaggtgcgccagtagaacagctaaatgagctcgaggaagttttcaagaaggctgcaaagactgatactccagcagaagtcctacactgcctcactcaatattttatttcgctctgttggttttgtctgtctggtctaagtctaaccactcagcctatcttatttgcaggtacctgaccatctctgttgcaaaatcacacttgatatcttcagagacccggtgatcaccccgagcgggattacctacgagagggccgtacttctcgaccaccttcaaacggtaaccaacacaagcgtctgacagtttgttgcaaagcactcgtggtttttacataccaagcttatgaactttgtaatctacatgtaggtggggaggtttgaccccgtgacccgtgaggctcttgaaccgcaccagctggttcctaatcttgccat

SEQ ID NO: 6458 - DNA, 588 bp, Zea mays
  misc_feature (566)..(566): n is a, c, g, or t
  misc_feature (577)..(583): n is a, c, g, or t
ggctcttctctggcccccactcttagagcacaatgcccaggtactgatacaaactcatgccagctatatataccttactgtttctcacagtaaaatacggtggtcattttatgatatctacaattatttttccatacacgtactgaagccaaccatggttactgtttggaactgaaaattattccaactctttgctttatctgttgaagcaattctaccagcaagaatccgcaaaactgcgcaaccagatccaaatgctgcaaaacactaacaggtagagctaggagccttgtgcagtaatttactttctatatactactgagtactgacaagaggaatgcaagtgactgcatggaagaacgtactgcccttacgcgtgttttgattatttctctcccttgtgattgtgaaggcacttggttggtgactctgtgggaaacttgtcactcaaagagctgaagcagctggagagccgccttgagaaaggcatctctaagatcagggccaggaaggtaagaaatgtgtaacattatccaaaccatcttcaagcatactaagcatgcatntaactactaannnnnnntaccc

SEQ ID NO: 6459 - DNA, 483 bp, Zea mays
agattcaaggccatcgcttatggcggctggagttaacaggccccctccacctcctccaggatttccaccgtctcaaatgccaatgccaccgtatggtgtgctccctggtccgccgccgatgcttaggcctccatttttgccaggacctcctatgcaactagatgagtttgctgcctttgccccaaggcctcagttacctcagcagccatcatacgtgaagtcggctgccccaacagttgtgaagagaccattagcacagcacactcctgagctgacggctatggtatgccatctgtcatcatattttttgcgtgatcttttttttcctttttccagagatccgtagtaggattgctcattctgccttgaatcactacaggttcctgcatcagtccgtgtcaagagagaatctgctctccccaagccaaaaccaaaggtgcagcagcagccacaactatcaacagtatccatttcaaagccctc

SEQ ID NO: 6460 - DNA, 437 bp, Zea mays
cctgcttctgttgtatctgctggtttacagtcagggcagccattcccagccaatcctggtcatatgagtgctcagcaccagattgtctaccaacaagctcaacaattccaccaacagctccagcagcaacaacagcagcagcttcagcagttctgggttgaacgcatgactgaaattgaggcgacgactgatttcaagaaccacaacttgccacttgcgaggataaagaagatcatgaaggccgatgaagatgttcgcatgatctcagctgaagctcctgtagtctttgcaaaagcttgtgagatattcatactggagctgacacttaggtcgtggatgcacactgaggagaacaagcgccgcaccttgcaaaagaatgacattgcagcagcgatcactaggactgacatttatgacttcttggtcgacattgttcc

SEQ ID NO: 6461 - DNA, 421 bp, Zea mays
ctcgagcagccccaacctcgtccagcagctggtagagaaatcgtctgatatgttaagatccgtgctgaccccacctaactttctcggccgattacataacttagccccctgataagagggtgcctaatttacgagaagcctggaaacaaatcaaagctgccatggcaattcaatgactgaagtgttgttgatgaggctgttttcagtgcaccgctataggtctgggtatccatggccacgctgtggtttcaagaccagagttggcggatagttacgtacacaggcggcaaatgtgtctcttagccgctgtttcagtgcaccgctgtaagtttgggtgtccatgtccatgctgtggtttcaagatcagagtccatggcggatagttatgtacacaagcgacaaacgtggttcttagcttagg

SEQ ID NO: 6462 - DNA, 372 bp, Zea mays
gacggcggcccgcagccatagaagtgggcatatgggctactatgctaatcctcaaagcgtgaggggggggcatttacctcgtagtttgtcatttgagactgatctcctgttttttgtcacttcagttcttcttttgcttccctttttaacttggctttgtaactttcaccttccttggatcgtgaaaagcgctgtggtgtgtgactgtgtggatggatttggtgcgccgctgatgcatatcatcatgtgatagaagaagccagtatccgtcgaggattactgcgagtatcgcctgtttgttgttcatacgtcatactgctgcactgcacttcactgtttgtgtgcccgttgttgcattgtatggttcggtta

SEQ ID NO: 6463 - DNA, 395 bp, Zea mays
cgttgggcacggtgatcacgcctgcacgggcgaccggatctgctccgccgcctatggtgggcgtcgacaggtccatgctgctggagcttgcgatcagcgccatggatgaactagttaagctggcacaggttgacgagcccttgtggcttcccagcctcagtggctctcccgacaagaagctgctcaactttgaggagtatgcccactcgttccctccgtccgtcggcgccgtgaagcctgtgggctatgtatccgaggcctctagggagtctggcctcgtcatcattgacaacagccttgctcttgtagagacccttatggacgtggtttgtatcctgttcatgcatgtttttgcaatttcgcttggtaccattgttgctccatgactttttttt

SEQ ID NO: 6464 - DNA, 375 bp, Zea mays
cttcccggcccccgcgctcgtcggcgaggaggagcgagccgagaagaaggccaccacgtacccgaggttcgtgttcgaggactacatgaacctgtacgcgcgccacaagttcgaggccaaggagccccggttcgaggccatgaagtcgtcggccatcgccaccgcgtgagcacataatactgccgtgttttctcccttcgtgtggggtgcatatgcttgagcttgaagagccatgtgcttgtatgtagtggcacgtacggtggttatgcgtgtatcgtggaatggcgcggcgtgatgtattttggttgtctcagatctaagtgtgtgcgtatatattgtgtactgtaaagtttgcagcgtctggttaatgtatga

SEQ ID NO: 6465 - DNA, 413 bp, Zea mays
aaagggaacttctcagaatcatgtccttctatagcattgtgaatgacaaccatgaactttgtcaatgcatctgggcccttgagtcggcaacaatttccaaacacttctccaataagaaacttaccgacaacttcctctctagaccatcctgtaagtttttccatggctgtgttccattctgaacaagaagtgttctcatctgatgcgaaaattgggggtagcagaggattaggattgtgtacaatagctttgtagtccccttgtatgttgataaatttatccatgaccaccttttgtcctgtaacatcttgtccaacaaaacagacaccaacaatattttgtgtgtaatctctgctggaacaagcattgacaataacaaatattgcacccttagattgctctgacccaaatgt

SEQ ID NO: 6466 - DNA, 330 bp, Zea mays
gatcgagcgcgtctggtaccaacaaggaccctgtgtacatacagcttatggtgtgctgatgatgtctgtactgtttccctgctcttctgacgaatcgcaatcgcaatgcagtcagaaggagcagaggagtgtgcttaggttttgagcggctgtctctgcacatttggcgctaacacggccaaggtagccttggcgccagatatggcacttggtgcggacgccctcttataagttacgtaagataagaaccacatggtgtaataaacagcagagagcctgctgagcgtttgaacctgcagcgatgtcaatcaagttgccgtgtgatgttta

SEQ ID NO: 6467 - DNA, 650 bp, Zea mays
cgagagctgggaaactccctggcgacactgcttctaccttaaaagcatggtggcaggctcattctaagtggccgtacccaaccgtaagtgaacacattgatcctatcactcccagcaccattcctagttactcatgagcatattattacgttgaacacatggatcctatcactcccagcaccattcctatttactcatgagtatattatcgtggaccacttgtttaggaggaagacaaggctcgactggtgcaggaaacagggctacaactgaagcagatcaataactggtttatcaaccagcgtaagcggaactggcacaacaattcggcgtcatcctcgtcggacaaaagcaagagaaaaaggtaatatcacaagaaactagactaagcttctgcttccacatccttgacacctttctggtttctgtttgctgtatgcttatgcttgtaataaaggaacactgcaggtgatgggaacgcagaaccagcctggtagggcatggtcggggaacgaagtttatgtaaataatgccttctactgtgaagagttccatcatatttgttgctccagaaaagaccctcagaccggtgtttcctgaacccatccatattcatacaaagacatcagacgatgaataatgttgcgagt

SEQ ID NO: 6468 - DNA, 582 bp, Zea mays
tgttcttgtgagggcagttctgcggcttaccgactcgttagcgcgagaagcgcagccgattcatggcggtgatccggaggacatcatccacaagctactgagatcagctgtaagttaaacgtaacattcagaaggtttttttttggcagttaacaagtactacgacatctatcgtttttgttcagcatgcacagtcatcctaatagctaataccattattctctctgtgaacttgtgtagtgggctgaatgggtcagggagaaggcagatgcagcagacaacgacgtgtgtaataatggatccagtgctgtggaacaagaagggtcgcgcatggttcatgacaagcaaacgtgtttgcttttagctcgaatgatcgagatcagcgctgggcgagctgcaggtgaggctgcgagcgaagatggtgaccgtcggattatccagctcactgggtctatatgtgacagtctcaagcagaagatgctagtatctcaggtatagcacatgtatatactactacagaaagtttgtgcgtagttattatttcccttttttcatgtgacgaacatgatgacctgatgatgc

SEQ ID NO: 6469 - DNA, 470 bp, Zea mays
  misc_feature (281)..(281): n is a, c, g, or t
  misc_feature (293)..(293): n is a, c, g, or t
tcttatcgtcctgtggtgacgtagtgtttggcaaccggctgataaacgacgaactgaggcctgaaccattgctattgcgtgaccatgctgccgctgctgtctcgcagttgaatgctgaccaacggctcattttcgaaaggctgactgaatctgcgctctcctgctcgccgggcatatttttcgtatgtggacatggtgggacgggtaaaactttcttgtggaacgctatactcacgcatttgaggtcccaacaaaaaattgtgcttgctgtagcgtcctcnggcgtggcttcnctactattaccaaaaggccgtactgctcattcacgtttcaaaatacccttcgatctagatgagagaggtgtatgtggtgtcaagagaggtaccatgctgtctgaacttatacagcgaacttctcttgtcatatgggacgaggcgccgatgacccatagacattgctttgaggcccta

SEQ ID NO: 6470 - DNA, 503 bp, Zea mays
tcggtcacctcagggatgcaggtagccacgtccttcacctagatggcgggcgagcagcagtggtaccccaggtacgaccatagtatgatgacccagatgctgtggacttcagggacatttcaacctttttatttccgatcatcacctagctgattaactaaataagctgtcaattgttctgcaggtaccaggaccaggaccaggaccaggaccccatgtcgttcatggacatcaaatagcacaagccgaagaacacaataagatactggaagtggcagctagtactgttataccaacttctaaggcagggcaaccaccaactttccatggagtttagagtgatcaaaatcatgccttaagctgtatatctgtacagaagtgtcagaaccatattctttgacatgtaagcttagttctagagttattatcaggagtcttgtataggttacaagacaacagcctgtctaccgccgtattctatctacggaagaactcgagctgca

SEQ ID NO: 6471 - DNA, 357 bp, Zea mays
cacagctggtgatcagcctgagtcaagaacgaaccgcgcaaaacagtagtgacctttgctaggtggtacgggtccatagggctggcccgtagcacacagcaatggcggtggttcgggtattgactcagcctccaattgttctgggttaaattttgcattttggacgtacgactggccgggcaatgccatggttggttttggtggttttagggagtctggagtcatcggtgctttttgttggctggctcgtggttttttggtatcaggtttgcttttgtaaccatagatgtaggagagccccccttgatgatacagtcaatatcagacaaatgcagcattgtatcgtgagattcagta

SEQ ID NO: 6472 - DNA, 414 bp, Zea mays
  misc_feature (19)..(19): n is a, c, g, or t
acgggcgcgacgaatccgnccatcgatccaacgccgagcgcgcgttggaggagggacctgccaggccccacctgcagtgagagactatagatagatgccttcctctctcgatcacctgatggctgatgccttcgccgccgtcttcgcctgccgctgccgctgctactactagttgccttgctcgcttccccccctctcgccccagccgcttccgccctctcccttccgtttccttcccaactcccaattcccaaccctggatccaaatcccaagctatcccggaaccgatacggaggggcgcaagcaattattagctggctagcccggcctgtagctccgagatcatgaagcgcgagtaccaaaacgccggcgggagcgacggctacatgggctcctccaaggacaagatgatg

SEQ ID NO: 6473 - DNA, 376 bp, Zea mays
ctgacgtgtgtatgattattttggtgaattgtggaggaaattagtctcacctgttggcactggagtgaatggtggaaaccaaccatggcccttggctttaggatggttgttggtggtgtagaatacatacacatcgctgcccccgttttgttttgttttgttttgttttagggccttgtgggggcggctgtatataatggaaaaacatttgatccattactgaggcatggcccgagaagacaccttcaaatgggcttctgtgtaagcttgcttatttgagaagtaggaagccatgcagtagattttgtatccaaaagccgtgtacttgtttttgtctgatatgtaatctagcgcatgtcacacatatgtattccct

SEQ ID NO: 6474 - DNA, 382 bp, Zea mays
atacgcgcccgctcatcgccacctcggcgtggcgcgtcgccgctccgtgacgtgcccaccgtccccgtacctcgccggcacagcacagcacagcacaaaagcacagtggaaggctggaagctaagacgtcagtgaacgctgctgaactgcagatagcgactgtggggccacaacggtcctcgccggagcgacgagatggacacttggagtccgaccggatcggcctgtgttcgttcctgtttccggtccccctctctcttccccgttgttccttcaacccgtcaactatggtagcccgtagccctactgctacgtttaaatgtgtattactattacgtgtaattcctccaagcgctgatatccaataaggacgaaccggatt

SEQ ID NO: 6475 - DNA, 720 bp, Zea mays
cagtccctggagaatcaattggaaacaagcctgcgtggtgtccgcgcaaagaaggtttgattcttaatcaaatttctataatcaattgttcaataaattactaaagatcgttactactgttgatgctcttaacaggaccatctcttgatagatgagattcacgatttgaatcgaaaggtctgtaatatggtgaatttatagttctgtgttatgtgttttatttgatttagtagcactgactaaccactttgttggtcacaggcaagtttatttcaccaagaaaatacagacttgtacaataagatcaacctgattcgccaagaaaatgatgagttacataaaaaggtagctgatgaattgaataaaaataccactaagtaactgcctaaccacacatatgacatgatattaattgttctcagatatatgagactgaaggaccaagtggagttaatcgggagtcaccgactccattcaactttgcagtagtagaaaccagagatgttcctgtgcaacttgaactcagcacactgccacagcaaaataacattgagccatctactgctcctaagctagggtataacatttattctctctatatatttcaattggttaactagtgttgactacagtgctataatgagttgctaaacacatgcagattgcaattaattccatgaagaagagtaaaactgccgtcttatgatgctgaaggaaact

SEQ ID NO: 6476 - DNA, 382 bp, Zea mays
ggcgatgatggctatgtgacgcatgttatcggaatccagctattctctgaggcgaacatcgatctcagcagcgtatcgtatccggtgtacaagcaaaagtccagcagcaggcccagcattcaagatctgaactcatctccccacgagcacgctccgaaaatccagagtgcagaccactgcggcatgcttcagttgtcagacgaagttctcgcacacaacatcctatcccgcctgtcaccaagagacgttgcgtccatcggatcggtgtgcaccagaatgcatgagctgaccaagaacgatcacctgaggaagatggtctgccagaacgcgtggggaagggacgtcaccgtgaggctggagatgagcaccaagatggtaggat

SEQ ID NO: 6477 - DNA, 385 bp, Zea mays
tcagaggctcccttatctgttagcttgactgatcaacaagatgcgcagcaccctgctaatggttcattgaagatggacaatgaaatacgagcaatcacacctcagggtggacaggtgacaggtgctaagaagcgcaagtctggatgtgtaagaaggtttaagcaggatgaagtaacacatgagcaaggagatatccgtgatcgaacaagtgacaagccaggcaacgagactgttgattccacagaaggagatcctggtgataagaacaaaggggaggactctggtaaccaaattcatatgcctaagatcattaagatcattaagccagtgcgctattttgccacagttatggatggtgtgcagcaagttgcaataacattcaagg

SEQ ID NO: 6478 - DNA, 398 bp, Zea mays
aacaaactttatttcatgcaatttagaagctaaataaatttccatatattattctagtttcatcatcaatattccttacatgtataagtaatcctcccttaagccatatttacaactaaggacaatgagtaaatttaaaattaagaatgccaacatgtaataagttaaatttgtatagatactatctttctaggcacttgtacatgcaaatggaatatcaaatgtttcttaagaaatgtatagatactatctttctaggcacttgtagcaatcatagactctactttgttttatgaccattaatttataataagttaaatttgtgattgtacatataatcacacattccataaaatttatttatttttacatgccaacatgttgaactaatgacacca

SEQ ID NO: 6479 - DNA, 391 bp, Zea mays
cgctcttctggcccgagcgtggacgccagggtggcagaacgcagacaaggcgctgacggccttcctcaacggcccactggccgactactcagtgaaccgcaagaaggccgatagcgcgagcacgtccctgctgtcgcctcacctgcacttcggcgagcttagcgtgcgcaaggtcttccacctagttcgcatgaagcagctcgtgtggagcaacgagggcaaccacgctgccgaggagagctgcaccctgttcctccgttccatcggcctgcgggagtactcccggtacctgagcttcaatcacccgagcagccatgagaggcccctcctggcgcacctcaggttcttcccctgggtggtggacgagagctacttcaagatttggaggcag

SEQ ID NO: 6480 - DNA, 577 bp, Zea mays
attgatggatgtggatgtgctcatctgtggtgaagaaagctttggcactggtaatatatggcttgtggccttgtgggttgtggctatcatttctatacacacaacagtaaacatgtcagcaacctcttgtattgttatgttagatgggtaaattctgttaacatgtggtatataaatggggccaatcacttgtgttctgactgtgagctctctcgcccttctattgagttggtggtcatgaatccaacctatagtaaagtcaaaggacttgttagtatttggtataaacattggtgggatgtttacatgtactattgtggccagggtctgaccacattcgtgagaaggatggcatctgggctgtgcttgcatggctttcaattattgctttcaagaataaggacaaccttggaggagataagcttgtcactgttgaagatattgtccgtcagcactgggccacatatggtcgccattactacacacgctatgactatgaggtacttccttttttttgacatgccccttgcatatatgtaccacctgtttaagatatcattctaaatgcacaagtttt

SEQ ID NO: 6481 - DNA, 406 bp, Zea mays
gtgacgacgccatctgcattcacttttctgttcactgacagaaggcactcaatatatttgccatcgcggtcaaagaaaccgattggagccttctctgcctcttcaccagctaatgcgctgttgatgataatgcaaagacgtacgaaagcgtctttgctcttcagaaggcaggaagcattgctgctgtcgaaaacctcgccaaggagcatcctgtcgatcacctcatctctgtgccacccagtaagcttggtcatggctgcgttccactcagagcaccatccgaactggtcggcaccaaatatcggaggaatgagcgggttcgggttgtgaatgatggccctgtagtccccctcaacccgggtaaatttgtccatgaccaacttgtgaacagtcatatcctgggcta

SEQ ID NO: 6482 - DNA, 620 bp, Zea mays
cagcacgatgaaaggtttcaggaaaaggaagaccatggcaatccagttagcatggatgtccagcagctgcattcattgttcgatgttgcagtacagaacaatcttacttcccttatttgccactgtatcctcttcaggaggctgcttatgcatttctatatcacatcttctttctgttattttcttaacatattcaccagatatcacagatgtttgtttggatgagaatgctgtgtcaagtgatccacttctggcttttcttttggatgaggtggtcatcaaggactggtgcaagagggctgttaatgtgctcattactgagattggtgtgatctgtatccaaaaatgttcaatcgaccctagattcagttacatgcttttttttatgtttcgtttttcatgtgttcagggccacacatgttgagggagtggtactgctaatctgttaagtcactaaccttaacgatatcttagataggtctggattagaaacgatgagatctaggttatcccaactgcaaaagtttgccacacagttggcaggaatttacagtatacttgaagttatggtttcatctttcaatgaagcagtttcagcgcatgttaatgacctgcaccaa

SEQ ID NO: 6483 - DNA, 586 bp, Zea mays
catggtacaggtacagaggttcacccttgctgagggaaatacattctgtatgttgtttgtcacactgctgtagtgtatttttagctagcagtttaatccttggtggtatactccaggaattggaagctctggctggcaagcacccgaacagcttcgtcatggtcgtcaaactcgtgcaatggatctttttagtttgggctgccttattttctattgtatcactaaaggcaagcatccgtttggtgaatactatgaacgggatacaaacattgtaaacaatcgctttgatctctttgtggtggactacataccagaagcagtacatcttatatctcaactgttacaaccaaacccagagacaaggtaagaactaagaactaaggtctgtgcagcctaaattcccttattttcataggttatgtgagtgttcttgctttatcgaaaattgactcttttttaatgttaacagaccaacggcagtatacgtcatgcatcatcctctcttctggagccctgaattgcgcctttcgtttctaagggataccagtgacagaattgagaaaaccagtgaaacggacctcataaa

SEQ ID NO: 6484 - DNA, 1361 bp, Zea mays
  misc_feature (755)..(774): n is a, c, g, or t
  misc_feature (785)..(785): n is a, c, g, or t
  misc_feature (787)..(798): n is a, c, g, or t
  misc_feature (800)..(810): n is a, c, g, or t
  misc_feature (816)..(816): n is a, c, g, or t
  misc_feature (821)..(822): n is a, c, g, or t
  misc_feature (825)..(827): n is a, c, g, or t
  misc_feature (832)..(833): n is a, c, g, or t
  misc_feature (839)..(842): n is a, c, g, or t
  misc_feature (844)..(844): n is a, c, g, or t
  misc_feature (846)..(846): n is a, c, g, or t
  misc_feature (850)..(850): n is a, c, g, or t
  misc_feature (852)..(852): n is a, c, g, or t
  misc_feature (855)..(855): n is a, c, g, or t
  misc_feature (857)..(864): n is a, c, g, or t
  misc_feature (867)..(869): n is a, c, g, or t
  misc_feature (872)..(874): n is a, c, g, or t
  misc_feature (876)..(876): n is a, c, g, or t
  misc_feature (878)..(887): n is a, c, g, or t
  misc_feature (891)..(892): n is a, c, g, or t
  misc_feature (894)..(902): n is a, c, g, or t
  misc_feature (905)..(908): n is a, c, g, or t
  misc_feature (914)..(917): n is a, c, g, or t
  misc_feature (923)..(928): n is a, c, g, or t
  misc_feature (936)..(940): n is a, c, g, or t
  misc_feature (948)..(950): n is a, c, g, or t
  misc_feature (959)..(961): n is a, c, g, or t
  misc_feature (964)..(966): n is a, c, g, or t
  misc_feature (968)..(968): n is a, c, g, or t
  misc_feature (977)..(980): n is a, c, g, or t
  misc_feature (982)..(987): n is a, c, g, or t
  misc_feature (993)..(993): n is a, c, g, or t
  misc_feature (1000)..(1003): n is a, c, g, or t
  misc_feature (1022)..(1024): n is a, c, g, or t
  misc_feature (1029)..(1034): n is a, c, g, or t
  misc_feature (1036)..(1040): n is a, c, g, or t
  misc_feature (1042)..(1049): n is a, c, g, or t
  misc_feature (1052)..(1066): n is a, c, g, or t
  misc_feature (1068)..(1074): n is a, c, g, or t
  misc_feature (1076)..(1105): n is a, c, g, or t
  misc_feature (1109)..(1110): n is a, c, g, or t
  misc_feature (1117)..(1119): n is a, c, g, or t
  misc_feature (1121)..(1123): n is a, c, g, or t
  misc_feature (1128)..(1138): n is a, c, g, or t
  misc_feature (1142)..(1145): n is a, c, g, or t
  misc_feature (1148)..(1148): n is a, c, g, or t
  misc_feature (1152)..(1154): n is a, c, g, or t
  misc_feature (1157)..(1160): n is a, c, g, or t
  misc_feature (1164)..(1166): n is a, c, g, or t
  misc_feature (1170)..(1173): n is a, c, g, or t
  misc_feature (1175)..(1175): n is a, c, g, or t
  misc_feature (1177)..(1187): n is a, c, g, or t
  misc_feature (1196)..(1206): n is a, c, g, or t
  misc_feature (1209)..(1209): n is a, c, g, or t
  misc_feature (1212)..(1221): n is a, c, g, or t
  misc_feature (1223)..(1224): n is a, c, g, or t
  misc_feature (1226)..(1230): n is a, c, g, or t
  misc_feature (1232)..(1239): n is a, c, g, or t
  misc_feature (1241)..(1247): n is a, c, g, or t
  misc_feature (1249)..(1250): n is a, c, g, or t
  misc_feature (1253)..(1260): n is a, c, g, or t
  misc_feature (1263)..(1272): n is a, c, g, or t
  misc_feature (1275)..(1279): n is a, c, g, or t
  misc_feature (1282)..(1293): n is a, c, g, or t
  misc_feature (1295)..(1296): n is a, c, g, or t
  misc_feature (1298)..(1314): n is a, c, g, or t
  misc_feature (1319)..(1321): n is a, c, g, or t
  misc_feature (1324)..(1340): n is a, c, g, or t
  misc_feature (1342)..(1344): n is a, c, g, or t
  misc_feature (1349)..(1351): n is a, c, g, or t
  misc_feature (1354)..(1355): n is a, c, g, or t
  misc_feature (1357)..(1357): n is a, c, g, or t
ctcttcagaactgtaggcattgactagattctgcagttcatggctgttgcatgtttaaaactcaatagagattcaaatgttacttatttcacacgcatttcttcacctgcaggcaacaatcccgggtttcatagctagaggaatgtctgtcgctgaggcagaagatttactgcgaacaagtgtaaaactggccaatgaagctcgagatgaattttggaagtcaacactgaggaagtccaaacctatttacaaccgtgctctggttgctgcatccattggtagctacggagcctatcttgctgatggatcggagtacaggtaacacgaccataccacacgaaccatgagatagtcagacaacattagattcagggccttttttgtttgtaatggtagttacttgtacattatagagcatgtcctcgttctgtatgcctgtctctcacacgaattggtcttgcagtggatcatacggtgctgacatcacagccgagaagctgaaggacttccacaggcgccggctgcaggttcttgcaagtgccggtcctgacctgattgcgtttgaggccattcctaaccaaatggaggcacaggtactttgtaaatcagagctccatgtgaatgaactgaaacatgatggtttaagaaacaaaggtttgaactgcagttgtgcatgcctggtgttgaaactgatccctttctcttataggcattggttgagcttctggaggaagagaaagtccagatcccttccnnnnnnnnnnnnnnnnnnnncacccaccccncnnnnnnnnnnnncnnnnnnnnnnnctcccnacacnnctnnnttttnnctcccnnnntntnttantnttntnnnnnnnntcnnnttnnncntnnnnnnnnnncccnncnnnnnnnnntcnnnnatcttnnnncccccnnnnnnaccccccnnnnncccccccnnnacacccccnnnttnnncnccccccccnnnncnnnnnncatccncaccccnnnnttcccaccccttttatacnnntcatnnnnnnannnnncnnnnnnnnttnnnnnnnnnnnnnnncnnnnnnncnnnnnnnnnnnnnnnnnnnnnnnnnnnnnntttnncactcannncnnncatcnnnnnnnnnnnattnnnnctnactnnntcnnnncacnnnatcnnnntncnnnnnnnnnnncccctctcnnnnnnnnnnnccnaannnnnnnnnntnncnnnnncnnnnnnnncnnnnnnncnnacnnnnnnnnccnnnnnnnnnnccnnnnncannnnnnnnnnnntnncnnnnnnnnnnnnnnnnnccatnnntcnnnnnnnnnnnnnnnnntnnntctcnnnctnntnaaat

SEQ ID NO: 6485 - DNA, 261 bp, Zea mays
  misc_feature (233)..(233): n is a, c, g, or t
caacagcaacagatgcagcaaatgcagcagcagcagcaacagatgcagcctcaacagcagcagcaaccccagatggtgggtacaggaatggggcagcagttcatgcaggggcacaatcgggcagtgcagatgatgcaagggaagattacgccacaggggccgggcagcatgcctgggggaggcttcctaccttaagcaccttttatcagcaggcatcagatgaattgagggtntacactgaccaagtgtcgagatgtcaac

SEQ ID NO: 6486 - DNA, 315 bp, Zea mays
  misc_feature (158)..(158): n is a, c, g, or t
cggcgatggctaccggagctggcgaggctgccgacggaatggatacaccacccctgggatgcacctgagtctgtgcttcaggctgcaggagtcgagctaggctccaactacccacgccccattgtggagttagatgcagccaattccaggttgcaggntgccctgtcagagatgtgggagcttgaggcagcctcttgtgctgccatggagaacgggatggaagaaggcctcggcgattccacagatgagccgccgatcgacttccctcaagaattacggatggaagtggaccgacaaccagctcaacctgctatc

SEQ ID NO: 6487 - DNA, 580 bp, Zea mays
tcaatttcaattcttgaatgtcgattttatcaagagattattgtgtctatcctgtggatatatattccttaagataactagcattgatgggcctatgttgccaacagtatgataaaatttctagtggatgtccatcatttcccagctgatgattcttgtactgaaatctgaagcataaaactatactggagagaggatttggcagggtacagtacaactgatgtacagctgaatattttaaaaggacatgtgatgtcgatatatacagctgaatattttaaaaggacatgcaacagtcggtttttttagaagcttcgttcatttcaaaacttgaaaaaaaattatatgtgaatgtataggtgatacaccatttggtagttttgatgtagcagtagtgatactaagattgtctgttccggacctaaactgcagcgagtaaaagctgatgcggatggcctgtcaaagagacttgaagcacttgaagcttacaaaaggcaattacctagctatcaaatactgatatccttatgtacctgcccacggactaatcttcgttgagaggcggtgcaggaaacttttg

SEQ ID NO: 6488 - DNA, 845 bp, Zea mays
cgaaagactgagactcgaattacgtactacactagcatcatttcatggcatttaatcaggtgtccgaattgctctttttctaggtggattcgacacggcgcaggccgctgcgaggttcatagatttcttcttcctcgcgcgcatctgttccattatcttctcgtcttatcttatatatctatctatctatgaatctatctgcagggcctacgaccaagccgcgatcaagttccgcggcctgaacgcggacatcaacttcaccctggacgactacaaggacgagatgaagaaggtgattccccccctgttgcaattgcgaatcgaacgaccaacaccggtagaagaaggagcccacacacaccgccatgaatggagtgtgaatagaacaaattaagaacactgcagctgctctgttcatcgactaataataacgtctctctcttagtctctttcactgtttgatgcctggattcttgtcttcctgccgtgtgccgcgtcaaatccctcagatgaaggacttgagcaaggaggagttcgtgctggtgctccggcggcagggcgccggcttcgtcaggggcagctccaggttccggggagtcacccagcacaagtgcggcaagtgggaggccaggatcggccagctcatgggcaagaagtaattaattagtcaatgctgaatcggaaaaaaacaaaacaacgattagtgccgatttttttgttttatttttatttttggcttgatggttgatctcctttgttcttgtcgctgctgcaggtatgtgtacctgggcctgtatgacacagagacggaggctgcccagtaagtgacgcgtcctctgtgcttc

SEQ ID NO: 6489 - DNA, 379 bp, Zea mays
acccactgaagcagagctgcaggacatgatcaacgaggttgatgctgatggcaatgggaccattgacttcccagagttcctgaacctgatggcaaggaagatgaaggacaccgactccgaggaggagcttaaggaggcctttcgcgtcttcgacaaggaccagaatggtttcatctcggctgctgagctccgccatgtcatgaccaacctcggcgagaagctgactgacgaggaggtcgacgagatgatccgtgaggccgatgttgacggcgacggccagatcaactacgaggagttcgtcaaggtcatgatggccaagtgaggagcgatccccgttatctatgaatgaattgaagtgaaatatcaggcacacaagctg

SEQ ID NO: 6490 - DNA, 716 bp, Zea mays
ttgcctcactgccgaggaaattgaggcggatataatttcattggcgcaatcagaaggtattgaagcttgttgccttgagatgctctcaacagtaacggaagggttcttggcgctttctttattaactgtaatactagcgaccaagtagtaatggtgaacaatctagctccagcattaattttgacgagtctatttttactgtttagcagattctgaagtttatgatatctatactgtcaaggaggtggatgacacaatggaggccacgtcagcagcttcatatccaaggtgaataaccaaatatgaatcacatgtgttttattcaattcggctcatgtgagagtgtcttcttaatgagtggtcttgttacataaggttacaagtggatgatggagaagatgaatgctacgaagattgtccatatgacacagatgattccaatggtaaccgtaccatcattatttttcgttaactaatcagttagatccatagctgcttgaattagctgaagctctttccataccgaatatgcagccgaagacaatcctctttttgattatcctgatgaatcttccgaggacgaggatgatggtaggaacgacgaggatccttttggagacaaagaaggttctgactcagattacgagaaggaagaagtagaggtggaagaggatgagtaacggtgaagggaagttgtgatgaaacgtgcggttgta

SEQ ID NO: 6491 - DNA, 485 bp, Zea mays
gtctctcatggatcctggtccagaggtggagcctgaggaagcagaaaggcccgagatcatggccagtcatcggcgcaacggtggagcagctgaggaactaccaccggatgcacgactggcttgtcgggtacctgtcacggcacaggacagtgaccgtcgacatgccgttcacttcctacacctacatcgctgacccggtgaatgtcgagcatgtcctcaagactaacttcaccaattaccccaaggtaaatgacctgaactcactgatgtttcagtcttcggaaatcagagctgaaagctgaatcgaatgtgcctgaacaccgtgtagggaatcgtgtacagatcctacatggacgtgctcctcggtgacggcatcttcaacgccgacggcgagctgtggaggaagcagaggaagacggcgagtttcgagttcgcctccaagaacctgagggatttcagcgccattgtgttcagagagtactccc

SEQ ID NO: 6492 - DNA, 729 bp, Zea mays
  misc_feature (711)..(711): n is a, c, g, or t
atgttatgatagatcatgagcttcggaaactccggctgatagactggggtcttgctgaattctatcatcctggcaaggaatataatgtccgtgttgcatccaggtagctgcagatatactaaaaactctcattgttggttcaatggctaacagcagttaattcaggtacttcaaggggcctgagcttcttgttgacttgcaagattatgattactctttggacatgtggagtctgggctgcatgtttgctgggatggtatttacccacattactattccacctatttgctgccatatcctgatatcctcctttggtatctctgacggtttcttatagaaataactggtactgatttgctgttctgattgcagatttttcgtaaggaaccatttttctacgggcatgacaaccatgatcaacttgttaagatagccaaggttatcaattcagcctgcttgttgtttgcaatgaactgcttagctagctatgttgcttacttttgcaatgtcatgtagcttgcaagtgctgattattgttacatcctttatcaggtacttgggacagatgggctgaatgtttatttgaacaagtacagaattgagcttgaccctcagcttgaagccctcgttggaaggtatagcacgccactgctcactagactttttggtggcgcgcctttgccgcatttttcattaatataaggagaatcngttttttggggggatgca

SEQ ID NO: 6493 - DNA, 391 bp, Zea mays
ttgtgttgtgtgcgaagcttggaactttataaatcgttgtcatgcccatggctttctatttctttctcggagctgcgcaaaaccgtctccatttctgggcttctcaggacagctggacgcgggaagccggaaccaaaaactctgttccgcactcatctcctctgctccaggcttcaacatccgcgcaggagcgaaaacgcgtcccaaatccttttttatttgccagaaatttctgagccctaacccgcgtgcgcgtggtgcctgggccgaattattaggagatccataggctgtctcactccctctggccagcagcctgactgtgaactccagactccgatcgtctggtcctctagctctcatgtcatggactcatggaggctactactcg

SEQ ID NO: 6494 - DNA, 953 bp, Zea mays
ggtttgcttatcttcttttgtcatttgatagtcgcacggatgtctacttaactagttgtatctaaaagggtccttttccagacatgagaggttagcagtacatgaaccttcaaatattgtgataacgagggagatcatgcagtgcttgaataaccaggagtggctaaatgatgaggtattttccattttgttgcttctgaaactctttgcagagttaaggatacataatgtaatatatcagtataaattcttgtttttttttcttttccgactactttcaggctatcaatttgtatcttgatcttcttaaagaaagggaactaagagaaccttgcaggttcttaaaatgtcatttcttcaacacctttttctacaagaaggtttgtgttagaacttgttttaccttttggtgggacaattcttttttatttatttttccttgcttctaaaaactagcattctcatccaatgtgcatcatatcagtttgaaagatatgcatgcagttactacctgatgcattgtttcctagcatttatatgatatccacccaaacagctcagctgattcatacatgtgcctgcacatgagttgcccatttaatgacattctcatttttttgtattattattgtcatttgtcttctgtattcattaccatattttgttgcgattgtgacatgcgttgtattttagtgcaatgttgtgttaattataattcataactcatctctcattactgtctatcagctgatttccagtgggtatgattataaagctgttagaagatggacaacaaaaaggaagttagggtacagtctaattgattgtgacaaggtaaagcactttttggattctgttttcagctttagatcttactagggtttaactttgtatgcatttgaccgaaacttattatccagatatttgttcccatacacaaggaagtccattgg

SEQ ID NO: 6495 - DNA, 383 bp, Zea mays
ctgagaggacgctaccataggaatgggagcaggaaccaggaggaggagacggtactcgccccaaagtctccgtctacctatctaatcgttagtcgtcagtcttttagacgggaagagagatcatttgggcacagagacgaaggcttactgcagtgccatcgctagagctgccatcaagtacaagtaggcaaattcgtcaacttagtgtgtcccatgttgtttttcttagtcgtccgctgctgtaggctttccggcggcggtcgtttgtgtggttggcatccgtggccatgcctgtgcgtgcgtggccgcgcttgtcgtgtgcgtctgtcgtcgcgttggcgtcgtctcttcgtgctccccgtgtgttgttgacttgttgtaaa

SEQ ID NO: 6496 - DNA, 382 bp, Zea mays
ctgcagcagccaacatgggcatcactccattctaataactctggttaggcatgtgttctgaatcagctggcacgtcgtagtggctatcgccctttgtgctgcattctagggtttcgtctcagatcttgatctcaacatcgatcgtgtgtcgtttaattagagtactttccagtgtggggatagaaatggagaataatcaagttagagcgcgcacctagtaggccactgatgatccggtaggtacagacttgattgtctcctctaaatatcccttttcatttcatgttctctctgtttttcctattttttttgttcctggaccccttcaactcgccagtagagagctcgttgtgcctctccgatcccatgtttgcgtatgtct

SEQ ID NO: 6497 - DNA, 629 bp, Zea mays
gtttaggtcgtccgcttgtcgcctgaagagagaaaggaaaagatccataggtacataaagaaacggaacgagagaaatttccgcaaaaaaataaaggtaccattgagcatttcaatagagcggtacctccgcatggacatcttacgtattcagctgtgctgacagcctgacatacaacgaaatgcagtacgcatgtagaaaaaccttggcggatagcaggccccgtgtccgtggaaggtttgccaagaatgatgaactctgtgaagcagcgcaatcaggctcccagagtcatgaacattatgaacaaactgtaagttttcaattgaactatacacagtcttatcaaacgagaacctggaattaaaaagaaacatgattcttcttatgcattctcattgtttttaaacaagaacctggaatacttctatgcatagttaacaagatctcttacctttttttcaggaccatatgaaagaagaggacatgctggacacatctgacattcttgcgcaactaaatggattaaatccctacaactacaagtataaatccaccattgaatcatggatatgattctcaagtctcaaccacacaaaaactaagacccagtgtcttatttgaagttgtgc

SEQ ID NO: 6498 - DNA, 417 bp, Zea mays
ggctcatactctcatgttgctgtgggggcctctggagatgactatgacgcattagccgaaagtgttggtgatggccgtcttttctttgctggtgaggctaccacgaggcgttatccagcgacaatgcatggtgcttttatcagtggtttgcgggaggctgctaacatcacgctgcatgccaatgcccgggcgacaaagagtaaagtagacagaagtccatcgacaaacacacaggcttgtgctgctacattaacggacttgtttaggcaacctgatttggagtttggaagcttctcggttatttttggaggaaaagcttctgatccgaaattcccagctattctgaaggtggaattaggtgcgtcgcgaaagaaaaatacagccgaaggggtaaagacggaacagaaccactcaaac

SEQ ID NO: 6499 - DNA, 445 bp, Zea mays
ttttggatggtggtggcaacagggctatttgtacagggagaaatgaggctgaaacttgaaaaacactcagcaggtgagtctctctgtgtgtgtgtgacctgactcaatgcaaaacttgacacaaatcattgaatttggcacaaaatattcgtatcctaatagagaacatggctcatgacttttcaggtctcgactaacaggctgcagatgtgaatatcagcgccaactcatcctggaaaagagcctaacgagtttcaagatccacgaagcagatccgtcacttgataagactccaatcaatcaagacagggccatgacaggacgtctagctttagcgagctaagatgctcctaagttttgtgtcaaatgtagatggtagatggaacctggttacaagaaacatttcttggcagccggtgctttttctttttttcttttggcttca

SEQ ID NO: 6500 - DNA, 522 bp, Zea mays
agtgtgggagcacggtgccaacttactcggctacgagaggcactctcctcaacagcaggccccatcacatgttggcaatggtttgttctttcatcccctggaagctgcagcagagccaaccctgcagatcgggtatgtcatcatatgcctccagatgcatcatgtgattcgctatatcgtacataaagcgagcctgtgcatcgatctgatcatgtcttgttgttgtgtttggcatatgcatgtttgcaggttcgctcctgagcatatgaataacttcatgccaacatggctaccctgaagatggatcttgaggcaaaggaaataaataaagatgcggtggcagcatcatactctatgcaagctaagagtgacagctgtgtttcagtcacatatatgatctagtctgtgtgtcaatgtgtcgaaaaacatgtctgtgattttgttatatgaatgtaacgcgcaatgaaacatacaggactagctgcttgcttgacgatgcgtttgcgtgtatccgtataaatt

SEQ ID NO: 6501 - DNA, 407 bp, Zea mays
cagtttgaagcaagttaagcaaccgcccttctcgtttgtgtcgtgtcgtctcgtcattcatgtgagcagcatccgtggtgaaattccgccatcgctatttttaaatgatggcgcggaatttcgatgggtcatcaccagttggtgaacgaactagggaatttattgtgtcttgtaagatacaactttactgggttgtctatcaaattctgcgttggctcatcgtcatcgctttactggggctaacaatatagttgtggtggaaatctgccatccatgcttccatagcaagctcttagatgatcggaataaaaggggattttgatgggccaatcaggaagtgggtttggttaatctatatatatggagcatatagcttatgcagctgttcatccacatggtttcagtgt

SEQ ID NO: 6502 - DNA, 595 bp, Zea mays
tctcctattcaagaggaaagcattcctattgctttaactggtagtgacattcttgcaagagcgaagaatggaactggcaagactgctgcattttgtattcctgcactggaaaagattgatcaagaaaaaaatgctattcaaggtctgttctatactctggatttttatttgatatccaacggatttgaaagattctaagatgatttaacttgatctcttccatagtggcagtggtgttatttttttcattactcaggtttcttttttggcgtgcatgaatgttctttgttttttagatgtaattttcattgtatatttcatgaaaaagcttgaataaggtctctttatgatttgcagttgttatattggttcccacaagggaattggctctacaaacatcacaagtttgtaaagagcttggtaaacatttgaagatccaagttatggtcaccactggtggaaccagcttgaaggatgatattgttcgtctgtaccaacctgtgcacttaattgttggaacacctggccgtattttggatcttacaaagaaaggtgtttgcattttgaaggactgttcaatgcttattatggatga

SEQ ID NO: 6503 - DNA, 517 bp, Zea mays
ttcgccgaacggtattttatactagactttgtttacaatagtaaaactgatctacagcatagctaggttgatacaccgtagccagctcgggcatatatatactctatatatcgcatgcacagcagggataatcatatggacgttcttatttagctgaaaaactgtctgtgtaggtaggtatgcctatatatatatgtgtcttccgatccttgtactcttctgcacaacagattcagccgttcaccttaatgtctaaagtattcgccacattctcatggactgcgcaggagcgtcacctgggagaaatgaacaggcaactcaaacacaaggtccttatctctgtttcctatagtcgaacgatctagagctgtatatactcctataattaatattcgcttgatcttttgctgttgttaacatggacactgtttcttaatttgtttactatctatctatatatatatgttatatgttgtccaattcgacagctcgaagctgaaggctgtagcaactacac

SEQ ID NO: 6504 - DNA, 524 bp, Zea mays
tgagcagcctgaggcaggagttctccaagaagaagaagaaagggaagctgccgaaggaggccaggcagaagctcctccactggtgggagctgcactacaagtggccgtacccttcggtgagagactaatctcccgtgcggccgtgccttaacacaatgctgacagatcgattaccgtactcatacagcacgcgcgtgccttgtgcccttggctcgctgtgcttgtgtttgtctgaacatgcaggagacggagaagatcgcgctggcagaggcgactggcctggaccagaagcagatcaacaactggttcatcaaccagcggaagcggcactggaagccgtcggaggacatgccattcgtcatgatggaaggcttccacccgcagaccgcggccgcgctgtacctggacggcggcgcgttcatggccgacggcatgacgacgtatcgcctcggttcatgaaccgccgtggacaatccaaaaccaccggacgaccgtgtcggagtgtttctgcgtaccaggaagat

SEQ ID NO: 6505 - DNA, 524 bp, Zea mays
tgatgggaaatatcttgtggcctttagccgaaaccatcaagatttgattgtataccgtccaatctggttgacatattcatgcaatgaagaatgtgatcctcatgagcttccgccaaaggcaaagaagtttgacagcttctttaagcagctttattcaattcctcttgcatctagcaatgagtatatttgcaaggactttttcctgtacatggaatgccatcgatttggtttatttgcaacatctactgcacaaagtaacgaatcaactgccactgagggtgcaatacatggggtgccattaattgagaaaataactttccatcttgtgaggtacaaatcttgtctcttgaggaatgcattttttgggggttctaagttacaatatattttgtatccgttgtttccatcgtttgggtggattaggacatttgtatttgtgttaccaggctagaagatggtgtgatacttgatgaaaaggctttctgcaatgattttatcaatctggcacatagtattggtgcagg

SEQ ID NO: 6506 - DNA, 355 bp, Zea mays
tttcggcgtcgccccagccatcaaggagcgaatccccaaggagcccacgagaccctccaccgttgtcgtggtaggtgctggccttgctgggctagctgcggcacggcagctggtggcgttcgggttcaaagtgatcgtcctggaaggtcgcaaaaggtgcggtgggcgtgtgtacacgaagaagatggaaggcggtgggcgcttggctgctgctgaccttggcggcagcgtgctcacagggacatttggaaacccgctaggaattgtggcgaagcaactcggcttgccaatgcacaaaattagagacaagtgtccactctacaggccggatggctcaccagttgatccagaggtg

SEQ ID NO: 6507 - DNA, 723 bp, Zea mays
aagatgatagtgacctacaactccaacaaactcgtgttcaatggccatgagatctacccatcagctgttgtgtctaaaccaagggtggaggttcaagggggcgatttgcggtctttcttcacattggttagcagtcagatgctccatcgttgacaaatgttctacaagtactactaccacttcttcctccctgatggccatggtcatcaaatttcaggttatgacagacccagatgttccaggaccaagtgatccatacctaagggagcaccttcattggtaatgttcagcatttcttaccttagtagggatgccaagtagcatatgatgatagcaccatatctttcatatacagaaaattccgtgatttctagcacttcagagtaatgtggctaaaaggcagcctttacatttgcaggatcgtgactgatatacctgggacaacagatgcctccttcggtaggttctgctgattcaggcttagcctattccatgttctagttcttctttgaattaataaccattcatcttccaaatttcagggcgacagatcataagctacgagagcccaagacctagcattggtatccacaggttcatttttgtgctcttcaagcagcagggtaggcaaaatgtaactgtgccatccttcagagatcatttcaacacccggcagttcgctgaggaaaatgaccttggcctcccagtagctgctgtctactt

SEQ ID NO: 6508 - DNA, 556 bp, Zea mays
caacgaacacaacattgcaaaccgcagagaaggcatgtagggttttttttaataacattgcaaactgtaaattaaactcttaacgttaacatgatatgcgcaagaaagacagtctcacagccatcatgtgtggttttctaaaacttaacgtgctgcctgttctgttcttgtggcttcagcagcgcaacctccagtctccaccggaggcgccaccggacctgaaccgctgtgtccctccttggccgcgtagcctgccggcaccgagcaatgacatggacgtggagacggagctgtacataggattacccggcagggagcgctcctccaaccgggactctgattgaaccacggattttcagttcgatcggctaaaaggaataagctccctgaaattaaagcatcgaagggcacacgtcaatggttttatttgcaacttttgtatgcaaacttgtacttgaaaagtaaaaaaaataaaaataaatctgtagtatgtggatgcaagaaacggctggttagctagctgcaagccttctggggcctgaaaatgaaatccacc

SEQ ID NO: 6509 - DNA, 696 bp, Zea mays
  misc_feature (328)..(328): n is a, c, g, or t
  misc_feature (330)..(330): n is a, c, g, or t
  misc_feature (335)..(335): n is a, c, g, or t
  misc_feature (337)..(337): n is a, c, g, or t
  misc_feature (352)..(353): n is a, c, g, or t
  misc_feature (355)..(355): n is a, c, g, or t
  misc_feature (412)..(413): n is a, c, g, or t
  misc_feature (449)..(449): n is a, c, g, or t
  misc_feature (459)..(459): n is a, c, g, or t
  misc_feature (473)..(473): n is a, c, g, or t
  misc_feature (485)..(485): n is a, c, g, or t
  misc_feature (494)..(494): n is a, c, g, or t
  misc_feature (498)..(498): n is a, c, g, or t
  misc_feature (502)..(502): n is a, c, g, or t
  misc_feature (512)..(512): n is a, c, g, or t
  misc_feature (517)..(517): n is a, c, g, or t
  misc_feature (521)..(521): n is a, c, g, or t
  misc_feature (538)..(538): n is a, c, g, or t
  misc_feature (541)..(541): n is a, c, g, or t
  misc_feature (549)..(549): n is a, c, g, or t
  misc_feature (556)..(556): n is a, c, g, or t
  misc_feature (565)..(565): n is a, c, g, or t
  misc_feature (570)..(570): n is a, c, g, or t
  misc_feature (573)..(573): n is a, c, g, or t
  misc_feature (575)..(575): n is a, c, g, or t
  misc_feature (635)..(638): n is a, c, g, or t
tgtcttctgcacatgccgtatcttgacgatgccccatacattcatgagaaattaatcagggaagttttatcacagtattgcgagtcatggagtagagatgatgctcaaaggcagtacattgtagaacttggtataccagaagaatggatgcatgaagctctggtgagtataaaatttctttagtaatatgctttgcaaatggtttataatgccagtgcatgaaaaaacatcacacatgaagcatgtgtagctaatgagctctatatacaggctctttatcacgaatactatggagataaacagggcgcactggagaatttgattcagngnggcancnggaagaaagctcatnntnttttcgtgacttctgttgctcattctatgtttctgtcatgtaagttttgcttacagnnccctaaacattttttcaaagaatttctttatttggnaaatatattnccctttttccccangggtgaaacatnttgcttttnctgngcanaaatatacanctgcncgtntttcctagaaacctcangangagtttgntcaaacnatttattcnttttnttntnttttttttgataaacatggcattcctggtatgaatatgcagtcacttcattcgttgttannnnggctcagctaaccatcaggaggtctggaggatcacaagtgcctggagaaccacaagta

SEQ ID NO: 6510 - DNA, 404 bp, Zea mays
taatgcattgtcataaattggaaattcgcagtgtgtcgcaacagagtagtcgtgttaagccattgttagtgtggtagttaaaatgaactgacaacttgaatttgatgatgtgtagtagctggggctgagtagaacattccaaatgcctactaatgatgtttttttaatgaatgaatctctttgcaggacaacagggtgggaagtggataattagcgctgtgtgtccggatttaattgcttaggatttcggcagagagaattatacatatgtaaattatcagattttgttcgtctatatagccttggtgtgcatgcaagtcatcaatcatgcagcttcctggatgcaataatggttatgtgaagctagttgtacagaaccttgtggtataggttgctaggtgtcc

SEQ ID NO: 6511 - DNA, 252 bp, Zea mays
atcaatttctttaacttagcgtactggttgtgggatttgatggtaacataaatagtatgagagttgcttgggaattagatgattctggagaatcagcttccaaatgttaatgacaacggaaaactcaatgtaggggcttcccctacagtatttctcaaaaaagaaaaaaaacggaaactcaatgcctctattgggacttggcagtaccaattaagtgatttccttttgttttttttatatctgtaggtttgc

SEQ ID NO: 6512 - DNA, 370 bp, Zea mays
ctggttaaggaaggagggaaaactcctacacagactgaatttccacttagcagccttgactctttcccatcatttccattcttcagatctaaatcagctcggatagacagttcaacgtcgcaatcatccagtcagagggaagataggttggtgctgaagaacaagtctcctaggtggcacgaacaactgcagtgttggtgcctgaatttccgtgggcgggtcactgttgcctcggttaaaaacttccagttggtggcttctgaggacaatggaccagagagccaagagagtgacaaggtgattctccaattcggaaagatcggaaaagacttgttcaccatggactacggttatccaatatcggcatttc

SEQ ID NO: 6513 - DNA, 701 bp, Zea mays
gagcgtgtacggaaggagctgaagaacgagcttaagcaggtaactctctttgaaaatgcttcattcatcatcgtttatggtgcattgttgactaacaaaacgtttcctacctctagggttacaaggaaaagcttgtcgatatcagggaagagatcatgcgcaagcgcagggctgggaaacttcctggagataccgcatctgtactgaaagcttggtggcaagctcattccaagtggccgtacccaactgtacgtgacaccacgtcaacttaattccctcgttagcttctgctatcaggttcggctcattgatgagcaactctttgcttactcgtccaggaagacgacaaggccaggctggtgcaggaaacggggttgcagctaaagcagatcaacaactggttcattaaccaacgcaaacggaactggcacagcaacccaacatcctcggctgaaaagaccaagaagaaaaggtatcacaatgaaaactgctttggtgttgcctaaggcgtaagcccagacaggcttgcctgcggcttgcaacatctttttttgtactactgttttcaacacgtggaattggaaacgttgcaggtgatgatggcccagagcaatcttgggaaaagctagagatgtccactatactttattatggcgaagtacattctccctcacttcgtaggcaagagggaaaggtatctt

SEQ ID NO: 6514 - DNA, 414 bp, Zea mays
gttcttcgatgaattaaaacttcaacatccgattgatttgtcatttgtgtgagctctcaaaggcttcactcttgtctgtgtaacattttcagtgatagatgacctgatataccatgcatcttatacctatatgacacacctagggcccggacggacgacctcgtctgggtgtagcccgtgcgaaatgggggaccgcatgggcgcatggcatattggcatgtgaaaggagagcattgctgccagcttaccgcgacggctgtttcgatattcgagttatttacaagtacctaatatatctactttcgtaatatctagatgacacatttgcaacatgcgtcaaaatttgctgaaacatttcgaatatgtatttgtaatataagtatagttattacaatagactccctcggttcgtta

SEQ ID NO: 6515 - DNA, 670 bp, Zea mays
gaacctagtgatgcaaataccaatagcgccaccctcctctcagatgagacagacgacaggcctaaagaaaacacaaatcaagaaacgggcacctcaaatcagcttgaatacgaggtaatgaacccaagactcatttagaagtttgttgcagcacttttttgttgttgctgttttagtatattttcatttctgttctttgatgttgccacacagatctgcccttttgtctctatgttgtatgttgatgacatgctaacaatatacttgtttaaacgcccttccatttcttggcgtgtttcagtctaatccttccgttgctgagcgcgaccagagagacaagatcggtgctccaggctctgccctagatgccagtcaatcatgtaagatatttcagcctgtaataactggtcttcctttttgttgttaaccacttcttgagttctatatctccatctgttttctgataattattttaattgccagcgactccgggaagaatgttttcacgtcctataaaaactaacctgaaggttgctgagtcgtctgcatttctagcatatgttaagtcaagcaccccagccaccagctcatttgatagcggactacaaagaggtgacagccggttagattctttggataaccatggtaattgctctagtgcaacagatag

SEQ ID NO: 6516 - DNA, 451 bp, Zea mays
cggatcaacccactcgttcgcctcaaagccaaaggtaaactaactaagcatatattatattcgtctactagctgcagtacgtctgtctgaatcttctgcatgcttgcaatgcaggtatcgagccggacttcgggctctacggcctcaaggcgatcaccaaggtcttcaagagcggcatcaacgcgacgccggtgatccagtgcagcaagggccccttcgacaagtacatgctgttccagctctacttctgcgcggcggggaacggcacgttcatcgactgccccgcgccgcagcagtacacctgctccaaggagatcctcttccaccccttcaagaagtggatgctcaagcagcagctcaaccaggacgacgaccctttccagctgcctggcgtcgccatggacaactgatacaccgtaccgtcgtctctgtttgcgtttctgtcaagtgt

SEQ ID NO: 6517 - DNA, 820 bp, Zea mays
  misc_feature (812)..(812): n is a, c, g, or t
ctcaaatgatgatgcaacacacaaatttgaggagaaaagtctagaacagctcaagcatgtagaccctttccttgacatggtaaagttttactttacaaaaacaatcatgctatgtaaaatgttgcatgagtaaaaaagttttcctttggtgcaaggacaaagatatcagtgcacaactactataattggtatcacagaaaaccaaacatggtgttacaaagcatgcaagatctgtaattcagcaatcattcaaaaggaaaatggttataaatgcacaaaggaaggatgtccatctacacaatttgaatggaagtaagtgtatactgctttgaataataattaccataatgcgcactgttagtaatattaatactataatctttagaacagacgtaccagttctataaatgattgtatattaaatagatccaattgaaatgagccttcactacaatatactcttacatctatatgtaaacatatgcttattgatcagaacaaatataatactctttttatttaactaactttcagttttatactctaattcagatacaagataccattcattgcaagtgatcacacctataatctagagtttatgttctttgagaaaaaatagatcaaatataatattctttttacttaactaactttccattttcatactctaattcaggtacaagataccattcattgcaagtgaccacacctataatctagagtttatgttctttgaaaaaaagggaatggagcttataggaaagagtgcatcgactcttcgaaaacaatatgaaccaaaggagatacanccggatat

SEQ ID NO: 6518 - DNA, 397 bp, Zea mays
gtcttggaattggaatgcctggcacaaacacgatgccagtgtttggactccctgggcaagcaatccatccctcagcgtctagcgtacagccattcccatcgttggcgggtcttcctgttaggccaaacctggcacctcaagtcccagccgtcatggctaacatggtgcaggagcaacagcaaggcgtagcgactcagcagcagcagagtctgaataatgaagctcaacagaaagcaaataccggagatccacaaatactacaaaaatagatgaagagatcttcgccagtaatcagtttctggatggtggtggcaacaggactaatactatagggagaaatgaggctgaaacattaaaaacggtcagcaagtgccagtgtgtaacctgactcgagcta

SEQ ID NO: 6519 - DNA, 365 bp, Zea mays
aacacttgtgtggaaacggttctgctaagaaggatgagtcctgtgactgcaactccagctttgagtgcaatatctgtcttgacccagctaaacagcctgtggttacaccctgcggtcacctcttctgttggccatgcttgtaccagtggcttcatgcacattcaccccactctgagtgccctgtatgcaagggtgaggtgctagaactgaatgtcactccgatatatggaagaggcggtgaagaagggaattccaccaaccctgacttcccacctaggccacgagcaaacagaagggagagcctgaggcaacagctgcaaatgacagacacaagaggaattgcaacagtggtgaggcagttgata

SEQ ID NO: 6520 - DNA, 400 bp, Zea mays
ccagttaacggatgaagtgctttgccaaagtatactgtcaaggttgtcaccaagagatatagcatctgtgagctccgtgtgcaggtgtttgtatcatttgacaagaaatgaagatctctggagaatggtttgccagaatgcttggggtagtgaaactactcgagctcttgagacggtgcccgctgcaagaaggttgggctggggacgtctggcaagagaactgaccaccctggaagctgttgcctggaggaaattgacagttgggggtgcagtggagccatctcgatgcaatttcagtgcctgtgccgtagggaaccgtgttgttctatttggtggggaaggtgttaacatgcagccgatgaatgacacgtttgtattggatttaaacgctagcagtcca

SEQ ID NO: 6521 - DNA, 395 bp, Zea mays
ttctgagtgcaggaggtccgatctggagccgtatcttggcctgcactacccagccaccgacatcccgcaggcgtccaggtttctgtttatgaagaacaaaatgcggatgatatgtgatttctctgccactccagtgctgatcattcaggatggcagccttgcacagcccctcagcctctgtggttctaccctcagggcttcccatggttgccatgcacagtacatggcaaacatgggttctgttgcatcgcttgtgatgtcagtcactataaacgacgatgaggaggaagatggggataccgacagtgaccaacaaccgaaaggcaggaagctgtgggggctggtcgtctgccatcatacaagcccgaggtttgtccctttcccgctaagttaaa

SEQ ID NO: 6522 - DNA, 839 bp, Zea mays
gggggggtactgactgcctcgaaggatcagattattaaggtctgttgcttgtgcttttgtactttagtctgtttttcttgtcttcaaagaactgatggcagtgtacacgctataactaaaattctagtgctgtctatggagatgggccaatccatccttgtgagcaaatgatggcagtaaattattaacttttggtacgtttgctaatgctatcactaattcgttttgcagctgtatgatattagatccatgaaagagctgcaatccttccgtgggcacaccaaggacgtcactggttagatagctgttccaatatcaagatttttataatttatataccccttcacatattttaagcttcaaaaattgacacaagttttggatgtactagttcatttgttcattgcatattttaagcttcaaaaattgacacaagttttgaatgtactagttcatttgttcattgtaaccatacattctatgattgttagaacagtggctaaaaaatttctagaaaggtatggtgcccacacttgtttgccaaggttgtactgaatatgtattcggttacttcatttttacagcattggcgtggcacccatttcatgaagaatattttgttagtgggagctttgatggagctatatttcattggttagtcgggtaaggtatccatagcataattgaaattactgatctttgtcacccttggaatttgctactttgtgctaagttattcaattcttttcaccctccaagatcgacgtacaactttttatgtcttttgttgtctgaaaataatgtctcaagtctcaacttgatgagcaagctgtttcatt

SEQ ID NO: 6523 - DNA, 445 bp, Zea mays
gggggatgttagcatgactgatatgtggaaaacaggacgtatccttgatgatcatgcattaagatggtttaaaatcatctgttctgttacataattgttgttacagcttgaatttcttaacatggaaaatagaagaagtgcagtgggaccagatggatttcctgtcagaagatgttgtcacccctcgagcccataatcagcagccggtcacagttgacgggccacatatggaggttccaagcatggacccataagacattaatggctcaacaaaactgacatctggagcggtgagttctcgtgtgacagcaaatgtttattgcaacagaagggccagacggtttcatgagcgtatgtcatctggagtgtagtcagggcagagcagtccacaacttcagattggtgcacgcccggcacctctgttgtgaagactgacgagctcaac

SEQ ID NO: 6524 - DNA, 372 bp, Zea mays
atacttgccccccaatgcaaggtgtaaagcccagtggaggacgaagagatcgacctcgctgtacgagtacgacgaagaacggaagggatgcttctcggtcagcggcggcggcgatctcgctgtacaaggcgattagtagacgtacaaaatgtaaacggaaatcgattgatgggcggaagacatgtacgtatcttgttttgatacccgcggccggggccctcctagtcctagaggcgtactgtatgattgatgatgcgggccgtctacaactactactggtgttgggctatatgtatatttatctataatgtaatcacctgtaactatagttggtcagattctaaagagcacggggcatgcaggtatggaaca

SEQ ID NO: 6525 - DNA, 416 bp, Zea mays
tcgtcgacgtctgatcgatgtcggtcgccatcgacgatctgcgtgctgcccgtacgtgtacatacgcgtgcagtgcatgcatgcatggtcgactcctactcggatccgatccgatcctgcttaactatatacatatatatatatacatgcatcttaatttgtgactttgtgaggagctcatcagtacgtgcatatcagctagctagctagtgtttgacaacagtcgtcgttacgttgtattgtgtcagtgaagttgctagctctagctagctacttgctgtacgtgtgtgagtgtgtgcagctgatctgaatcagtagcgtgtgcagcatgcatatcctagcagtgtgtgcgtccagtccaggtgtgtacgtacgtctcggagtgacgatcgatgtgtgccctagttgctcaagat

SEQ ID NO: 6526 - DNA, 603 bp, Zea mays
  misc_feature (92)..(92): n is a, c, g, or t
acttgggaaaagcaactggaacctcaaggtgaatattctttctttgatctgccatgcatgtgtggttgtgtgttgtatttactacatggtcnttattgatgtccttttccatgtctgcagaatttttcacggctccccggttctgttctaagacttcttcagacaccaattccagtaagtaatataattctattagttctgtacattctttaccacatcacatgtcatgattgctaacaattctggtctgaaaacagggagtgacagatccaatgctttatattgggatgctcttcagcatgtttgcgtggcatgtggaagatcattatttgtacaggtaaaaaactcgagtcttatgataatgattagctacttatcttttaaaggctgcgctgctgcggatgctgatttttgatcatttgaccagcatcaattaccatcactgtggggcatctaagacatggtatgggataccaggcgatgcggctcctgggtttgaaagggttgcaagccaatacgtatataacaaggacattttgattggtgatggagaggatgcagcgtttgatgttctactgggcaagacgacaatgttccctccaa

SEQ ID NO: 6527 - DNA, 393 bp, Zea mays
tgccttaattcactctctgcactgatgagatgcaagcgggatgctgagatttctaccagggcatcatccctctaccatttgattgacttgcatggtaaaacagtgtcctccattgtgaacaaagctgagcctcttgaagctcacctgacccttacaccagtaaagaaggttaatcaacatcgctgtgaggaaaacaacaccaactcatcggatagtgccaagttggaaaacaagaatggttcaacacataagaaaaacggtttctcaaaaccacacttgaaatgtgcagaagaggttctgaacggcaatgttgcaagtacatctgggaaatccattgcaagcttacaggtggaagcatctgatttggcaaacttccttaccatggatcggaat

SEQ ID NO: 6528 - DNA, 414 bp, Zea mays
ttttctgctggagaattatatgccaggcgctcaagcctttgagagctcttcgtcaacaagaaactctggggtcaccctttcagaggtttcagctaacccaggtttgccatatggcggcggaggcggtggcggcacgagctctgggctgtcagccatctgccctcctgaaatccagtgcccagttgtgatggacaacatgtcgtctaaccaagtggccagcatgagtgctgtgcctcctgtttcgaaggctacaattgacatgggtattcctgaattctcagctctggcagacttggtgaatgaaggctccgtcgatatccctggaggggcctttgagatgcctggtcctgagtttcctctgccagaaggcgatgacagtgtccccatcgagaccgatgagaccatgtacaacaa

SEQ ID NO: 6529 - DNA, 440 bp, Zea mays
gatgagcgaaatattctgaaaagatcagatcagtcagccttcaccaggtgcaaaacataatatcagtgtcattactaggttattaacataacagtaagttgcatgctaacccattatgatttctgcaaggtaccatacatctgtggcttccaatcaaggtggagcaagatatggggaaagctcttcaccacaagataacagttctgaggccatgaaaacggactctacatgcaagatgaagtcaaattcagatgctgctccaataaagcagggctccaatggcagtagcaataacgatgtgggatccagtacaaagaatgttgctgcaaggccttcgggtgacagggagagagtagcgtcaccattagccatcaaatctacccagcatgcctcagcatttcatactatacagaatcaaacgtcaccagctaatctgattg

SEQ ID NO: 6530 - DNA, 1029 bp, Zea mays
ggagaaagctttgagaaataggtgctttggtggtagatttgctgcaactacacaatgtattcttacctcagatgcttgtcctgaaactcttgtaagtatccacctcaattattactcttacatgttggtttactttacgtttgtcttttcaagggaaatttactgtattttttgtgttttgtgggagttctatacttctgttggactggttattgtaaagatttgttcaaatagggtcatcttataattgtttgaaatctgggaactgtggtttcactgcgttcaggaaaaagtgaattcttggttactgcatgaataacttatggaaatagaccttagagttgctgcatgattatcacaaatcattgctacgatatcttataatagttctttcgacctcgcattacatatataactgcaactcgtagttgcgttaaaaaaaatgcaactcttagaacgttcaccagtgtaatctttcctgaattgttatttaatggcatgtatgcactacttgtatacttatctaggattaagtaatctaactctaggccccatatttgcagcattctcaaacacagtcctctaggaaaaattatgctgatgcaaaccgtgtatctgctatcattttgggcggaggcactggatctcagctctttcctctgacaagcacaagagctacgcctgctgtaagggataacactgaacatccaacgttgattactctattatagtattatacagactgtacttttcgaatttatcttagttttctacaatatttagtggattcttctcattttcaagatacacaattgaaccataatcgaagtggtatgtaagacagtgagttaaaagattatattttttgggagacttccagtcaaattttcttagaagtttttttggtccagatgttcataaagtcgccgctttcatactttttttaattttttaattggtgcactattaggtacctgttggaggatgttacaggcttattgatatccctatgagtaactgcttcaacag

SEQ ID NO: 6531 - DNA, 400 bp, Zea mays
gttcttatagagtcattgatgaggaggcacttaagcatgccatgtcagtattcggtgtcgttacgaagataaaagttttccagacaaggcagtatgcttttgttgagtttgcaaatgttgcggaagcttgtaatgctaagatgaatctagatggtcatcttttcaatgatcccaggattcagattcttttctcaaacagtgggcttgcaccaaacaaattggacaacccaacatcggttgctggatttcctagttcagaaatctattccagtgatggtcgtctaggccctggtattggcagtggaactttgcaagggtatgatccaccaagaggaggaagaacaagatattacgattatgcgggtatgcctactccaggtggtatcctttcacaacctga

SEQ ID NO: 6532 - DNA, 919 bp, Zea mays
  misc_feature (856)..(856): n is a, c, g, or t
gacggaaatgacgagctattgctaacgaggatttcttcgttgccatgcgtacaaagaacccttaaaccctaatcctcccccgctacacgttcgcttgatctttacggccgccgctactcgttcgccatggctgcctgctcctccaggctcctaaacctcactctgagctcctctttcctccgctcctgccgcctcgcgtccagctccctacttcccaccgcctcccgctgccacccggggtcgctccactccctccgcttctgctctgctgtccccgagtttgtcgatgtcgccgccgaccctgccgaggcggctgtatcctccggacacccgtggccggagtggggcaacttccttgataagctgcgggccaaggggtacttcgagcaaggtttgccctccagcgtgagttctggcgagggagccgccggagatggggatccagcaactgcatctgagaacgcagcaacggctgcttccggtaatacggtggtggatgcggaggatagcgcggtgacctcggaagatatctatcattttctcaaggacgagaacagggtgaagaatgcgtgcctcaaatttgggcgagaccgcttcgatctcctcagcttgcttcccaagcaggatattcaagctattgttatgtctggctgtcctaataacaatcggaagcccgtctattctgcaaaaaggttgagagagtacgtgcaggtcaaagaagaagatgcatgcagcatttgcaaatttaaggcatcttgtgatagagcttatgtcactccaaagggtgaggttgaagttaggactgttgatgttgttcgtatactgttaagttatgcaatggataaaaaccattcangagataactctgttatcgaagaagtgtgcaagaatctgcaaaaagcttctctcaaagcttact

SEQ ID NO: 6533 - DNA, 385 bp, Zea mays
  misc_feature (69)..(69): n is a, c, g, or t
  misc_feature (141)..(141): n is a, c, g, or t
  misc_feature (331)..(331): n is a, c, g, or t
tttgcccttcggtctgtatggctcgatccccttatgattgggcatggcggccgggcgtcgtctggcttnttctggctcaacgcagcggagatgcagattgacgtgcttgcaccaggttgggatggggtcactgaccatganaacgggcggatcgacacactgtggatggctgaggctggtgtcatcgatgcattcttctttgttggttctgagcctaaggatgtgatcaagcagtacataagtgtcacaggcacaccttcaatgccacaacagtttgctactgcgtatcaccaatgccggtggaactaccgggatgaggcagatgttgacngtgtagatgctggttttgatgagcatgatattccatatgatgtgctctgggctc

SEQ ID NO: 6534 - DNA, 840 bp, Zea mays
aggaatgtggcaaactacatgggtcaaatggccatggctatgggaaaacttggaacgcttgagaatttccttcgtcaggtattaaccctcttttccaaatgcatctttgtgacatagataaagggttctgtgaatgattgtactccctcccaaaaagaatgctcatcttgcatttcagggatagcttttttaagtttggccagacagaaaaaagtactaaactactaatatttatttatgaatgcgtagtaagtatcgttaagttaatcatgaaatatatattgataataaactcatttgtaccttcaattgttggtactattctttataaacccaatagcacttaaaaagatttgattatttaatatgagggcattagacttgaatatatatagcgatatacatgatagagaccgtgtatagaacaataactttatatatgagatgaaataaaacaccgacatatgcagagacatctagcaatgacacttatgtatgaaactgaactgaatacgacaaggacaacctgcggtgcctaaatcctgctacttctctttgttgtatgtatcaaggctgacaacctgcggctgcagactctacaacagatgcaaaggatcctgaccactagacagtcagctcgggcgctacttgtgataagtgattactcttcacgtctccgtgccctaagctctctctggcttgctcggcccaaggaatagcaagaacatgctatttgactgcaatacttttcacaatttggttttcaatggtcaggagatttgacaaggctgcgacagacttgattcggacatatctgcacatactatgacccaaatgaag

SEQ ID NO: 6535 - DNA, 1444 bp, Zea mays
atgattacttattcctctgcccatttaactgttacaccgcagtttagtcgagcaaatttcgaactacaccataattggaactgtaaaagcaaatcctatgatggcaccataggaaaaactgctcagttttcaagcgctataaggattatacatagccaataagtttcggcctaggcaaaaaaattggcaaaaacgtgccctagtagacaacagcatagcctgattgtctaatcatccagctcaatgatcttcaccacagaggaatcacccactttctggcaaacgacgacgcggtcgtgggacttgatcacgcccgaggctttgccatggtcaagagcaaccttcaacacagactcatttgtagcactggtagattcagcctgaaagatacaatggagattgattaatgccaagtcaccagatagccatcgttcgttcagtcaggtatcaatcaatcagtttgccccaccgaatttgaaatatatgaaaactatttaagaacgataatacgtgacaagttagaggtaacaacaattgagtttcaatcttagcatacaccagcttgcttgggactaaaggctcgataaaccatacttatcataccatgcaaactgtttgaaactaaactactgaactgcattctagtgttcttgccttgaaacatggtgtgaaacccaatggaagcaagaaccattaaacatgatatagttatgttaataaaggttgatatatacatgtacgaaccctagtttcatactactaactaaaaatcgtcaaactgtcttgagacatcttattaccatagaagagttgaaacaacgctagacttcaaagaatacaatgatgctaatcccatatattggctacacgtaggaaatcagaagtttgtgttgcaattatagtatatacttaaatccctctaataaatgagatgtttaacttactgggtgtcgtggatcagcaagcatagggaagaggcctctaactatgagtgattgtcttgcctgcaagaaatcatacaaaaaaatgagtcatatagtaccaaatattagcacaatccactgacaaacagaaaaggaagttgaatggttatatgtttaatgtcaataagctaaactttgcacaggcagtaattcagaaataaatggtcaacatgctaataacaatatgagaacccaacattgcatagatatgttgtgaagatcacaaacacagttcaaaaggaaaaaaagttgttcacgcacctcaaaaacacctgtgaaactccacctcagttggtttgtctttagacgaggaatgacaacagacaaaacaggcatgctgggcctgtacttagcaatgagcctgcaaatcatttagatatacatgagactaattttcattgaacttaaactacagccctgtataagcaatattcatttgtatatatatatacctgcagctc

SEQ ID NO: 6536 - DNA, 732 bp, Zea mays
atcgcagaagtagtaaaggagaagataaagctgccaacatatttatctagtgaagttcactcaatgttgaaaggagtaagttgctgctatgtctaccttgctcctatgcattttgttcaaccagctttgtgttattgttaaaacctactgtttacggccatcactctaccattcgatctcataatgtttccattttttgtggataatcatcctgccatgatcatgtcatatttctcaacactgttatttatttcagttattgcacaaagaagctggcagacggctgggaagcggaccaggcggcagtgacgaaatcaagaaccacaagtggttcaagtctgtaaactggaagaggctggaggcccggcagatcgagccaagcttccggccgaatgttgctggcaagacctgcattgcgaactttgacgagtgctggacgaacatgcccgtgcttgattctccggtggccagccctgttgcggccaacagcaactttgtggggttcagttatgtgaggcccgcaccgttcctccagaagccgagtccccttggctaaagaactacttccgtgatctgatatctaccccagagttcaaataactatctttgagtccgaatcctatgtatttcttcaagacattagtgatgggaatctaaccttattgttgtgttgtgggtaggccagccaagcgcctattgcttgagaacaacagctggcaagtgacatggcaa

SEQ ID NO: 6537 - DNA, 1269 bp, Zea mays
  misc_feature (1243)..(1243): n is a, c, g, or t
cataaccgtgatcggcactttcgaacaaaaatggatggttgcagcatttcttcaattcaacaacaatgttcaaaagtgatacctgcatatgccatgatcaagtcagtttggtagccaatggccaagtgttgccttgtgcccatgctccagtttgctaggtaatgcacagtgaggtgaggaactgcttgcgctagcaatagcaggtgagaaagaatagtaacattgttccaagcaagataatcctggcaaacaccacagcttttagcaagaaaaacggtcctagactaccagcaacagtatatattcatgtatgaacataagggtcaacttgctacatactgagacaaccaaattacattcaattccaagataaaaaagagcggtaggccggtagctaacaaaaaaaaccaaatgcacccattgaaataactaaaactaaagcctagaatcctacaaaatactcttgaagatgtcaggctgtggagtttagttggggcaacagtccttagaaggttatgccctagtttagggatgttggtctgtatattcctctacccccctccccttcttggctgcctgttcaggcagtttgtgatttggtcgtatacagaccaccccccttttcttcttaatataatgatgcgcagttctcctacgtgtttgagaaaaataacataagccgcagaaaattaaaaaacataagaacttgattaaaagaacaggatgtaacaaaaacctgattcccacggactcctttatttagattctggaaattccgctctaaaatccacttgtagtatctagtaaaaaacaaaaaagtttagcctcaatgtataaacagagcaagttatagctccaggtccatggtccatgcaggatttggagcttgtaggaaaaaaacgaaaggtctaagaatatgggtttgatccaaactaataggaaaacttctttaaaaaaagaggttcaagaaaatcagaatgaagtactcactgtttctgaaggggtgacatctcgacacgtagaatccgttcaattttaggaggtaaagacttctcgacatcttttataacccgccttagaatatgaggcctcaattccttatgcagattcgcaagctataagaaaaccggcaaaagacgttatggttatgagtttcaatcaacggaaaaccaacatattatatgatgttcagtaaatataaagctttcatttggaacactacctcggtttcattgaaggaacntcaaattttgtatctttcaacaaaac

SEQ ID NO: 6538 - DNA, 528 bp, Zea mays
aagtttcaccagacgctgcctgaatcatgttctagttttctgttcttgcatacaaaagattgtagtgttttcgtacatatttatccataataccaaatcagatacatatacatgcttaacgcttccttctaatatccaagtatttgctgccccctctttgattttgtatgatttattatggactattggtataatgcagctggagttccatcagagaatattctttatcttggcggacctaatattgcttctgaaatttacaacaaagaatatgcaaatgcacgtatttgtggagctgacaaatggagaaagccccttgcaaagtttttgaggcagcctcattttattgtgtgggataacagtgatctcatcactcatgaagtcatgggtggcttaaaaaatgtctatgctattggtgctggtaatttctatttgtctttttcactgtttcctgttttcttgattacaatggagagctacatatatcattatattaagaataaaaagatgggctagaaacccttgcac

SEQ ID NO: 6539 - DNA, 1033 bp, Zea mays
taggtttgtcttcctttatttgtgtctctatagactgttctctgtcctgtcatgaaatttgtactgatctcatgtccatctgcagcactgggagccatattttcttaacagacaccgtgtgcacgttgcaggtctgctgcattctgaatccttaacactttgtcccgcttccatctgctcaacacacggagctgaaacgcaggtcataaaccaagacgagacgccaaggctgtacagcctggtgtttggagaaggagttgtcaacgacgcaacggcggtcgttcttttcaatgccatcaaggatctcgatatcagtcggctcaagggtggggttgtgctaaaagtgatatttgacttcctctatctctttgcaaccagcactgtcctcggaatctcagtaagaactgtttttttcttccatatatatgcattagcgccatctctttgtacacccttaactctttaccgcaaatttgtcagatcggtctagtaactgcatatgttctcaaagctctgtattttggtaggtgagtaatcgttgttaccgatcggtttggtttgtgttcatctgctactcttttatctttgaaatctcttccccatattttgttcaggcattcgaccgatagagaggttgccttgatggctctcatggcctatctatcatatatgctggcagaggtaagaataagattaccaaattttatctactagtacttacattatgcacttccacaattcatcccaagatgctgcatgttctgcagttgctagagctgagtggaattttgaccgtgttcttttgcggcattgtcatgtcccattatgcatggcacaacgtgacagagagctcaaggattacaacaaagtgagctcaataatcaatgttcaaacatttcttaagaatcgaatgctgtgttcgattggtctattcggatccattctcagcaatgtttatgctgttgcgaagtcatccttattcttaggatggtctgcaggcataatttcaacatttctttcattccgagacaaa

SEQ ID NO: 6540 - DNA, 579 bp, Zea mays
atagggattccaatggcgaaaagagcacagacgaatcctgatatcgcaatgcagtaagggagtttcagaactccatcatcactgaacagtccatacgtggcctgcaagtggaaataacagtatatgatattatatggcaaagagagagagagagaggaatgaaaataaatggtatgagtcgtcttcatacggtacggtacccctccctaccttgagagcttgtccagctaagatgataaagccagtgttgatcatgaaaaggttaatgtactgcagagcccatgtaagcccgtaaattttcggtcctgaagtaaaatgaaatcaaataaaaagaagaagaagaagaaactagtgagactattctatataatataggtagggagtgcaagtgcagagcttattactgactgaccatatatgtgtccagcaaggtctctgtatctgatatggcgtttgccaccgacttcatgaagccgtgcaagaagagcattagcgtacatggatatggcggcagctaggaggaggccgcatgtgccgccgatccagcctagagggaccatgattgatccagagtatcct

SEQ ID NO: 6541 - DNA, 845 bp, Zea mays
  misc_feature (318)..(318): n is a, c, g, or t
tacttctatacgggtccaatattggtgtgttgattcttgaaaaatagatatgtttatctgcgtatgcatacatgctcaattctttgtgattgataaacgttaaaactgtttagacactagctgaaagttttatatgccaaataagttgttgtactgttacttttgaggactcaataaattatttaatttaatgagctgactctttggaaaatttgttaaattttagacttcaagaaggagcttaggaccctcaacagagagcttcaattgcatattttggagctggcagatatattagttgagagaccatctcaatangctcgtagggtagaagatattacgctcatattcaagaacttacatcatcttctcaattccttacgacctcatcaggtgtgaaccttagattttgtcacgcgcgtatatttctgctattcttcaaagccacgttgattaatatctttttagtagtactaacattctttagtatcttttaggcaagggccacattgattcacatgcttgagagccaaattcggcaccgcaaggaagcaattgaagatataaagcagtgagtctactttctcatatatagtagtgttgaaatcacatttcatgtattcaattttagtctgtgtctataacctttggactctagagtctccagtcacaattccagtttcctatttacttgtatccaccttccatcaactagcactacatcgtctgtaaaaaaacatacactaggggatatatcattgtgatctcatccatcaccaaggcaaaaaggtaagagtttaaagctgatctttgatgttctattttaatcgagaagtcacccttgc

SEQ ID NO: 6542 - DNA, 528 bp, Zea mays
gactccacaggatcaaatggactcccagtcgcaaacactgcttgtccctgtgaattcagatcgttagtgcagttgcagaaccatggttaataaaaagttgacgtgactgcggactgagaccattaccttgctccatgtgtaagcttgctcagctgtgcattcagattgtgatgttgggttcgatagggcaagaatgattggtctctgcgtttaaaaaaaaatactgagcttataaccttgttgcctcaatagactcggaactaacgagttcagttaatggaagttacctcgttaaatgaggagattgcttcaacaacgtcttttgtgaaagtttgccccttcccggatgtgccaatcaacactgttggtttgatagcctggaatgccatttgagtcaggacagattcaggtggccatgatacattatagaatccatattttttcttgaggacaaactcatacattaacagcatctaagaggttgctgagtggtttatgctcatgagcccatggtttcttgaagtgttg

SEQ ID NO: 6543 - DNA, 725 bp, Zea mays
aacagaaccatgtcaggcagtttctagtgggagttgtcggacacatgaggatacggacataataagcgggatattttgagtagaatttagtacgtcagttccccggaaccttacccaggtcagcagtgagaagggcctcactttcgtagttgggacccgccaacactgttcccaatggtgagatgatgacactccctccagaacaaacaacggattccggggatggctcttcctctaggccacaaaatgtgtactcgggagggggagggtagttctttctacgacagaactggcacgctgacagcacaaagcatcccccttcaagggcgatatgtgtcatagaagacagccaagttggcatgcaatcaaccgtgggagcacaatatatctcaatacctgcattaacattaacataggaggattcagcatgaaagataaactcagtacatgagacattgtgcaatttagcattacaccatgagcttgttggaattcacctcattccatatgtgttgatgtgtatagggatgtgaattaattcgagttccactccaatccacactaacacatgtggattgaggtagatacaagagtatccaaacaaggccttattggttccaaagtatatcccaacactcctaatttaaaaatacaaatggccaggattagggataatatctttggcatacatggccgtcctgagaaagtgcaatctggtttcccaa

SEQ ID NO: 6544 - DNA, 801 bp, Zea mays
catgcctgcagcggcgagggtcgtgcccatggcatcggcactggcgggacgcggaaggctggtggcgcgtgcagcagttacagttgcgtgacattgctcttctgatttttgtcagtcctttttttggtcgcaacacacattggctgtcctgaattattttctccttgtgtgttctcttgcgcaggcaaaggcggatgtgccatcgagcacgtccgacgggtaagaacgttttactccctgtctatggcatccatgtgacctgagcccgggacatacgcctgagatgctccacttttcatatctgagattttcatatgtttgctgattttttgtcttcaatcactagtgcacacacatgccccaaccacaaaaggaaaatatgagtggactaagcagcaaagtgtggttttgagcatggatttctaattcggctacaataataaatgaatactcactggttgtagatatctctaggttatgtaactatatgttgtaagattttattatggtacatgaggccgtcaccattgaattgattgcaagatgaaatttggcaccgaacttgctgttttgaatgggttaccaacctgaagtaattacagtagtctggaaaatgagtatttcatccttgtgcctttgcttgcttaaatgaatctagttggcaaaataaatctggagacataatattcagttttattgtagttggtacttggcagcgctggatcgggcaccagttctcatcatttattgtccaagaagtgaactcgttgataaaaataacagatcttaagagatttatat

SEQ ID NO: 6545 - DNA, 1459 bp, Zea mays
agtggttagcagcccaaaagcaactgccagcttctcactatgttcagccagtgcacgttccttagattgctcatcaatgtcttgcaacactaaacctgtcattggcttatatccagcttgccttaagcgatccatcatctctcccaacattttgtagatctccttggaccttggatgcgatctatcaccagaaataaactcgtgaattgtattctgccattcaatcgagcttcttccaggaattctctggattctctccctcctaagcgtcctcctcatctctgcaacaccttcccaggaattcgcttgtgcatatatgtttgacagtaagacatagtgcccatcggcatgaggatccaatactcgcagtttcgccatagcttcctctgcaacttctacattcttgtagatgcgacaagcccctagaagtgccctccagatgactgcatctggctcgaatggcatgtccctgataagctgctttgcctcctcaatatgacctgatcgccccaaaagatcaaccatgcatccatagtgctgaaccttaggggttacaccatgcactacactcattgagctgaaatatttcttgccatcgctcacaagaccaagatgagtacatgatataagaaccccaatgaaggtaacctcatttggttgcagtccttctgatagcatccttgagaacaaggagagagcatcatggccgagcccatgattggccaacccgatgatcatcgagctccaagtcagcacatccttcactggcatagagtggaacactcttactgaattctcaatgtcaccgcacttggcatacatgtcgatcagagcggtcccaagcttgacatccaattcaaccccattgctctccacaaactgatgcacttcagcaccaacagcaagcgcccccatatcactgcacgccgagagcacgctcaccatggtggtgcagtccgggttgacacaggccgcgcgcatctcccgccacagctccagcgcatccttggacctccgccccttggtgtacgccgacatcatggagctccacgagaaggcatccctgtcgtccatgccgttgaacacctctctcgccaggtcgacctccccattcaccgcatacccatggatcatcgtgttccaagagaccatgtccctctcgcgcattccatcgaacactctcctcgcctccgcaacctcgccacgcgtaacgtatgccgcgagcatgacgttgcagaggaacacgtccctgcgcggcgcctcgtcgaaagcggcgcgcgcgaggtccgcgcgccccgccttggcgtaagcctcgacgagcgcggtgcgcacgaagaggtcggctgcggcgaagccggacttgagcgcgcgcgcgtggagggacgcagcgccgaggccgaggtcacgcatagccggaacggaggccgagagcgcggcggatgcctgcaggcatgcaaga

SEQ ID NO: 6546 - DNA, 781 bp, Zea mays
  misc_feature (681)..(681): n is a, c, g, or t
gtatcactacgcaaccagaagcaggatgcgctgtgcacgaactacacttcatggaccaatcttacttacaaagttacaagtcgatgaaaaggaccacctgggagaaaagaggttatagcttttgaatcacatcaagttgtcgtcaaagaaatccgataaaaaaaacatggtcaccataacggtaagtggtcaatagttgcaactaactcatgtttgaagcaactgacctagcctttctactcctaaaaacatatatctagcatagaattttctcaacgacagcctgtagactgcctagaacaaagagcatcataagaaaacatgaagcttcaggcatagcaaatacttatcatacaataatcagcagagattaatgcaacatacacattcccgaagctgttcttcgcatatgaaccaccatggtgaccaacatacatgaagagggaaccagaatgcttgagtctaacatgagggaagtgatcatcataatcactgattacctcacacaaataaacacccattttttattttaaagaaaaaccaatatgtgatacataccccaaagtttgcaagcacatgggaatgggacaccatctaaatcattctggtccttgtctgtcatcactaaaatcaagggtaaagcttaattaaactttttttattccacttactaaactgcantaacagaaagccatagaagctagatcaatctaagaccccaagggatttactgcacagtgggttcattaaacatttcttcattagcagaagtattatgacc

SEQ ID NO: 6547 - DNA, 749 bp, Zea mays
atagggtaacagaagtcactgagctggaagaatcgcctgggctctcagcctcagccttggatgaggaacccaacgcttgtgttcaagcagtgcttctcagggagccaaactcactaggacacaatcaaagaactgtagttcctagatcacagcatgcatctaatgtactgggtggaaatgagttggtgattgttggacctcgatatgctggttctgtgccacccattgcaacaagaggtctggaaaacagcaaggagagcggtggaaggggcttcaaacccaaaccttgtaacaacattttccaaaatggctcttcaaagcctgaaagggaaccgggcaattcgtcaaacaaaagaacagctggtaaaacggcggaggaccttggtcacaaggatagttcatctgaagtgtcctacgagtactgtgtaagggtggtcaggtggctggagtgcgagggctacatcgagacaaacttcagggtgaagtttctcacatggtttagcctgcgtgccaccccgcaggagagaaagatagtcggtgtctatgtggatacccttattgaggaccctgtcagcctttctggccagctcgttgacagcttctcggaggcggtatatagcaaaaagcggacgcccttctggttttctgcatggacctgtggcattgaaacaccacaagcacctaccgtttgctttgtatggagcacacattcggccccatctttttgtgcagaacgttgcattgattct

SEQ ID NO: 6548 - DNA, 740 bp, Zea mays
tacccaatgctttcgtatattatcctctcttctcattatttcatatgcacttgcaaaagtggcaaacaatcataatatcatcgctcattaaaaaaacagaaaaactattgcttgtaccatcacatggaaacaatttcaaccaaacatatatcgaggcgttaacagacaaactgattcaaaagaactcaggttggctagtgttctcattgtctcatatacactacaaaattaatagaaatatcaatcaatcatagtgccatcagcttgccaaatcgctgagggtctacagtcataggacagacaatttaaattaggtttctattgaggtataaaattcatcaactaattcagagggagctcatgcacttggagattgaagaacacaccaaagttgccttacaattaggctggtccaaacacagaatttaaatatttcataatcaagtctatccaaccgaagggcaggtctggtgcaggggtgagagttgtctcactgagtcaccaggtcgcgggtttgcagcagcctctccgtatttacagagggaaggcttgcctcggtttatcccttccccaaaccccactcatgtgggaacctccaacacaaggtttgccctttttaatcaagtctattctctattgctccaaatgccaagctttaggtacaaatgtaacacacatgagagggtccaataaaccataatttctgtacaatgtacatagcattaagtttgcacaaataa

SEQ ID NO: 6549 - DNA, 759 bp, Zea mays
aacacgtaacttgcgaataacgaacgagttttgccacagcaggacgatccttgtaccgtcgtccgcaagggttgtaatttctcacggaccgttacgacatgattgtatgtcaggttttgacagtttgagccaatgcaattcttctaatgaaaaagacaagtgcatgtgagtggttagcatctgcctatcgcctatcgggtatcatgtggagtcgtctggtataccgtcctacacggctacacctgagaacgaagcaaccttacccccaacaatcaccttgtagcgatccgaagttgttcatctttgagtttcagttctctaactccatcgtagctaagcgtttcagcaatgagtcaagagagagatttaactatttgtcaccgttaggaaggccacatcttcgtttccttgttttacctggcaactgtacgattttttatcggaaacgctaactggtctattttattgatgtaccatgttaaattagcatgtcacggtggatcttagtcttttttccggagagacacctggaaagtcatttttaccttcgcattttggactatttagtgcgttatgtgcaatttgtttagaattctatcatttagattgcgatatattaatatttaatgcaatactagtagtgtggatttttgggcacttatttgaagtaggatgagctgtggcacagggatacgaaaattaatgagcctcacactatgacacgtagcattaagatacgaaaataaacaacttgatttt

SEQ ID NO: 6550 - DNA, 710 bp, Zea mays
gctcttgctcctcctctgaccaccctcccggcctcccctcgctcaccatgaagatgaaatgaagctcttgtactgtaaggttcactcactgacggtatagtccccaactccccatgcgtagcagcggtagtaaaaccatccatcatgcccagtggggacggaaacatgtacagaatacagatacagactggatccgtttacgtatagattacgacgaccaaaacaggctgttcatcgtttgttccatgaacattgtttctctcacttctgtaccgtatgtgtgtactatggattcatagatctttcatgatgatgatgaggaggaggaggggacgacaataggagccggcggcacggagtcctccagcggccagcactcccagtcgccgctcttgttctgcgacagcgagaagtgcttgggcgtccacacctcccctctgtcgttcctctccttggcgaacctcctcgccgtgtcctccacccgccgcttcgcctgctgggctgtctcccagtccttcttcaggatcgcgttgctcaccttgccccagaccacggtcgactccgaggccgacacgccctgtgaattgtgatgtgacacgatccatcatttgatccatgacatgacatgcatgttcaccatcaaccaccacaatcagcattagatccatgctaccttttcgtcttgcaccacgggcgtggcgaggtcaccg

SEQ ID NO: 6551 - DNA, 534 bp, Zea mays
  misc_feature (12)..(12): n is a, c, g, or t
  misc_feature (21)..(21): n is a, c, g, or t
  misc_feature (94)..(94): n is a, c, g, or t
  misc_feature (211)..(211): n is a, c, g, or t
  misc_feature (217)..(217): n is a, c, g, or t
caatttataacnaggaatctnttcttctgtttgctctatagccaatgcttgtgttactgctctaaatggtttgctgctgtaagattgggtactnacaacaagatccattttttggatgtgcagagccaccttatggccgagtctatttctgagctacagaagaaggtaactaaagctgaaaaaactttcaaggcagttgcactcaggcttncaaaanaaaacagcacttgagtttgagtggccatttacctgctgatgatttgtggttcagaatgctctgcatctgaacagccatcaacagtagattgatcattgcagaaatgactgttggtactgctgtggtgtgcaggagaggtcactgcaggaggagaacaaggctctgcagaaggaagtaagctgccagagactgactgcaccctaaaccattgcattggcaacagaagggtttgatgtgtgtctcctctttttgtgtagcttgcggagaggcagaaggccgtcgcgagccggcagcagcaggtgcagtgggaccagcag

SEQ ID NO: 6552 - DNA, 326 bp, Zea mays
tcacagatgaaccgtgtgctataattgtgagcagtaacatttctacttgctcaaattagtcagtacatgcgtatcaactactatacatcgatgtggttcctacaagctgggctctccattgctttgtgattgctcgctctgacacaaaacaccgaaaagcatacgcaccgcaagccttgtgacatctcaagcgacaaacagctcggcctggccgtcaatgaacaagctcatgaactcctccccgtccacggtctccttctcgatcaggagctgggcgagcttgtggaggatgtcgatgtgcgtggtgattatctgcctgcttctag

SEQ ID NO: 6553 - DNA, 25 bp, Zea mays
cgtcgcaagagtcaaggatattaca

SEQ ID NO: 6554 - DNA, 20 bp, Zea mays
aaaaggtgtcaatatcgtct

SEQ ID NO: 6555 - DNA, 18 bp, Zea mays
aaggtgtcaatgtcgtct

SEQ ID NO: 6556 - DNA, 19 bp, Zea mays
cgagcagtggacgacaaca

SEQ ID NO: 6557 - DNA, 21 bp, Zea mays
cggagtcgtcgttggcaaata

SEQ ID NO: 6558 - DNA, 19 bp, Zea mays
aaatcatcagatcgttttt

SEQ ID NO: 6559 - DNA, 15 bp, Zea mays
catcagctcgttttt

SEQ ID NO: 6560 - DNA, 24 bp, Zea mays
actaggcgtccagttcagattttg

SEQ ID NO: 6561 - DNA, 29 bp, Zea mays
tggctttatttttcgatactgaagatcct

SEQ ID NO: 6562 - DNA, 20 bp, Zea mays
caatgttcttcaatccatac

SEQ ID NO: 6563 - DNA, 20 bp, Zea mays
caatgttcttcagtccatac

SEQ ID NO: 6564 - DNA, 25 bp, Zea mays
gggtgatgagaggaattagagcaaa

SEQ ID NO: 6565 - DNA, 25 bp, Zea mays
cttcatggcaacattagctgtgttt

SEQ ID NO: 6566 - DNA, 19 bp, Zea mays
caagatgtttatgaaagcg

SEQ ID NO: 6567 - DNA, 19 bp, Zea mays
caagatgtttatgagagcg

SEQ ID NO: 6568 - DNA, 20 bp, Zea mays
gcctgcccattaggctgaaa

SEQ ID NO: 6569 - DNA, 24 bp, Zea mays
tctgaattccaagtgcctcggaga

SEQ ID NO: 6570 - DNA, 36 bp, Zea mays
atcggagttattaatgttcgttgctgcctcgcggcg

SEQ ID NO: 6571 - DNA, 23 bp, Zea mays
ctgcctccgttcactctccaccg

SEQ ID NO: 6572 - DNA, 11 bp, Zea mays
catccatccat

SEQ ID NO: 6573 - DNA, 19 bp, Zea mays
tacgtactactaatattac

SEQ ID NO: 6574 - DNA, 13 bp, Zea mays
gatggattatatt

SEQ ID NO: 6575 - DNA, 12 bp, Zea mays
cataatgatctg

SEQ ID NO: 6576 - DNA, 12 bp, Zea mays
acagatgctcac

SEQ ID NO: 6577 - DNA, 11 bp, Zea mays
aacaaaagaaa

SEQ ID NO: 6578 - DNA, 17 bp, Zea mays
actgacagatggtcctc

SEQ ID NO: 6579 - DNA, 12 bp, Zea mays
gggggtctgaat

SEQ ID NO: 6580 - DNA, 16 bp, Zea mays
tgtcggggaggggggg

SEQ ID NO: 6581 - DNA, 18 bp, Zea mays
gaatcgcgggccgcggcc

SEQ ID NO: 6582 - DNA, 15 bp, Zea mays
atccaaatcagagat

SEQ ID NO: 6583 - DNA, 12 bp, Zea mays
ccgtgaccagtt

SEQ ID NO: 6584 - DNA, 18 bp, Zea mays
acaggccctaagcgacaa

SEQ ID NO: 6585 - DNA, 13 bp, Zea mays
actgtatgtcgtc

SEQ ID NO: 6586 - DNA, 26 bp, Zea mays
gcagccatatatcgaacgagacctga

SEQ ID NO: 6587 - DNA, 32 bp, Zea mays
tcgtacgttctggccggccgggccttgggcgc

SEQ ID NO: 6588 - DNA, 10 bp, Zea mays
agcatgtttt

SEQ ID NO: 6589 - DNA, 12 bp, Zea mays
tcgtcttacgat

SEQ ID NO: 6590 - DNA, 36 bp, Zea mays
attgtgaagagatgatactcagagcaagacatattt

SEQ ID NO: 6591 - DNA, 13 bp, Zea mays
tgtgagcgcccta

SEQ ID NO: 6592 - DNA, 17 bp, Zea mays
cttattgcaaaaaatgt

SEQ ID NO: 6593 - DNA, 11 bp, Zea mays
taacagctcag

SEQ ID NO: 6594 - DNA, 10 bp, Zea mays
aaaaaaaaaa

SEQ ID NO: 6595 - DNA, 11 bp, Zea mays
tgaaaaaaaaa

SEQ ID NO: 6596 - DNA, 39 bp, Zea mays
caagactaattacgttcgaaacatcaagtgatgctcctg

SEQ ID NO: 6597 - DNA, 12 bp, Zea mays
catttgcagcga

SEQ ID NO: 6598 - DNA, 45 bp, Zea mays
gaggagcgtgcttatggatctggcgttttcgcgggagaacgtcac

SEQ ID NO: 6599 - DNA, 10 bp, Zea mays
tttttttttt

SEQ ID NO: 6600 - DNA, 10 bp, Zea mays
attttttttt

SEQ ID NO: 6601 - DNA, 10 bp, Zea mays
tctttccttt

SEQ ID NO: 6602 - DNA, 12 bp, Zea mays
tgatatgtgatg

SEQ ID NO: 6603 - DNA, 12 bp, Zea mays
tatatatatgag

SEQ ID NO: 6604 - DNA, 23 bp, Zea mays
gagggtcggatcggtcgtctgct

SEQ ID NO: 6605 - DNA, 13 bp, Zea mays
gcacactgcagat

SEQ ID NO: 6606 - DNA, 11 bp, Zea mays
tttgttcgagt

SEQ ID NO: 6607 - DNA, 12 bp, Zea mays
attcacgattga

SEQ ID NO: 6608 - DNA, 14 bp, Zea mays
atggaacgcctgaa

SEQ ID NO: 6609 - DNA, 17 bp, Zea mays
cctgagcaaggccaggc

SEQ ID NO: 6610 - DNA, 12 bp, Zea mays
gtaaggccaggc

SEQ ID NO: 6611 - DNA, 11 bp, Zea mays
aaaagaaaaat

SEQ ID NO: 6612 - DNA, 10 bp, Zea mays
taaggacagt

SEQ ID NO: 6613 - DNA, 11 bp, Zea mays
ttcccgtcttc

SEQ ID NO: 6614 - DNA, 12 bp, Zea mays
tagttctataac

SEQ ID NO: 6615 - DNA, 12 bp, Zea mays
tagttctataat

SEQ ID NO: 6616 - DNA, 33 bp, Zea mays
cagtgcaaatttcacatatataattatataaat

SEQ ID NO: 6617 - DNA, 17 bp, Zea mays
gggcactaccgcactac

SEQ ID NO: 6618 - DNA, 23 bp, Zea mays
tgtgcatgctgacctacttccct

SEQ ID NO: 6619 - DNA, 19 bp, Zea mays
acgatttgtaacgcagtag

SEQ ID NO: 6620 - DNA, 10 bp, Zea mays
actgtactgt

SEQ ID NO: 6621 - DNA, 11 bp, Zea mays
gtactggccta

SEQ ID NO: 6622 - DNA, 11 bp, Zea mays
  misc_feature (11)..(11): n is a, c, g, or t
tttttcttctn

SEQ ID NO: 6623 - DNA, 11 bp, Zea mays
  misc_feature (10)..(11): n is a, c, g, or t
tttttcttcnn

SEQ ID NO: 6624 - DNA, 12 bp, Zea mays
cttcttcttctt

SEQ ID NO: 6625 - DNA, 11 bp, Zea mays
tttttcttctt

SEQ ID NO: 6626 - DNA, 15 bp, Zea mays
ctcccgtcgcccgtc

SEQ ID NO: 6627 - DNA, 18 bp, Zea mays
gccacggccacggctcgg

SEQ ID NO: 6628 - DNA, 12 bp, Zea mays
gccacggctcgg

SEQ ID NO: 6629 - DNA, 12 bp, Zea mays
accgccgccgcc

SEQ ID NO: 6630 - DNA, 10 bp, Zea mays
tagtagctag

SEQ ID NO: 6631 - DNA, 15 bp, Zea mays
ttttcggaagggtgt

SEQ ID NO: 6632 - DNA, 15 bp, Zea mays
  misc_feature (2)..(2): n is a, c, g, or t
angctagctagctag

SEQ ID NO: 6633 - DNA, 16 bp, Zea mays
  misc_feature (15)..(15): n is a, c, g, or t
agagctagctagctng

SEQ ID NO: 6634 - DNA, 48 bp, Zea mays
cacgctgcagcactatccaccgcacttcggcgggcagcatccacctcc

SEQ ID NO: 6635 - DNA, 62 bp, Zea mays
tgttaggagaaatagctaatcagaaagttaacacttaaggctttgttcggttattcccatta

SEQ ID NO: 6636 - DNA, 16 bp, Zea mays
agaggagggggcattg

SEQ ID NO: 6637 - DNA, 34 bp, Zea mays
  misc_feature (25)..(25): n is a, c, g, or t
  misc_feature (29)..(29): n is a, c, g, or t
cacccccgtaaacttctcattcgancggncaatt

SEQ ID NO: 6638 - DNA, 34 bp, Zea mays
cacccccgtaaacttctcattcgaacgggcaatt

SEQ ID NO: 6639 - DNA, 17 bp, Zea mays
cattccttctccaatct

SEQ ID NO: 6640 - DNA, 15 bp, Zea mays
tctatgctttcagtt

SEQ ID NO: 6641 - DNA, 11 bp, Zea mays
gagcgcgtgtt

SEQ ID NO: 6642 - DNA, 10 bp, Zea mays
gaagacttgt

SEQ ID NO: 6643 - DNA, 18 bp, Zea mays
ccttttttttttgcgaat

SEQ ID NO: 6644 - DNA, 21 bp, Zea mays
cctgttttttttttggcgaat

SEQ ID NO: 6645 - DNA, 10 bp, Zea mays
cttttttttt

SEQ ID NO: 6646 - DNA, 10 bp, Zea mays
ctttattttt

SEQ ID NO: 6647 - DNA, 45 bp, Zea mays
catatgggctgttcgggtcagattaaagtcggttgtttagattgc

SEQ ID NO: 6648 - DNA, 12 bp, Zea mays
ggcagcaacagc

SEQ ID NO: 6649 - DNA, 20 bp, Zea mays
atatgttacaacgttgtgtg

SEQ ID NO: 6650 - DNA, 20 bp, Zea mays
  misc_feature (6)..(7): n is a, c, g, or t
  misc_feature (10)..(14): n is a, c, g, or t
  misc_feature (16)..(17): n is a, c, g, or t
  misc_feature (19)..(19): n is a, c, g, or t
atatgnnacnnnnntnngng

SEQ ID NO: 6651 - DNA, 15 bp, Zea mays
aatgtcctgggccgg

SEQ ID NO: 6652 - DNA, 11 bp, Zea mays
aatgtcctggg

SEQ ID NO: 6653 - DNA, 12 bp, Zea mays
gcaactgcaact

SEQ ID NO: 6654 - DNA, 14 bp, Zea mays
tcccaggctcccag

SEQ ID NO: 6655 - DNA, 10 bp, Zea mays
gtttgagttg

SEQ ID NO: 6656 - DNA, 11 bp, Zea mays
tctgagccata

SEQ ID NO: 6657 - DNA, 10 bp, Zea mays
ggtgaggccg

SEQ ID NO: 6658 - DNA, 11 bp, Zea mays
tttttctcttt

SEQ ID NO: 6659 - DNA, 34 bp, Zea mays
ctctctctctctccgctgctcacagaatcacaca

SEQ ID NO: 6660 - DNA, 16 bp, Zea mays
gcagtatgccgtatgc

SEQ ID NO: 6661 - DNA, 10 bp, Zea mays
tagttctctg

SEQ ID NO: 6662 - DNA, 38 bp, Zea mays
atcttcagtatatgcagcttatgaattatgatagccgt

SEQ ID NO: 6663 - DNA, 31 bp, Zea mays
atcttcagtatatggagcttatgaaagcgtt

SEQ ID NO: 6664 - DNA, 31 bp, Zea mays
caaagatcatgtgaactgtctatttgatttc

SEQ ID NO: 6665 - DNA, 10 bp, Zea mays
ttccattcca

SEQ ID NO: 6666 - DNA, 10 bp, Zea mays
atggtttcca

SEQ ID NO: 6667 - DNA, 31 bp, Zea mays
gctagggctagctagctagatggcgaggcta

SEQ ID NO: 6668 - DNA, 27 bp, Zea mays
gctagggctagctagatggcgaggcta

SEQ ID NO: 6669 - DNA, 31 bp, Zea mays
  misc_feature (21)..(21): n is a, c, g, or t
gctagggctagctagctaganggcgaggcta

SEQ ID NO: 6670 - DNA, 12 bp, Zea mays
agctatataata

SEQ ID NO: 6671 - DNA, 21 bp, Zea mays
atcggatcggatcggatcgga

SEQ ID NO: 6672 - DNA, 26 bp, Zea mays
atcggatcggatcggatcggatcgga

SEQ ID NO: 6673 - DNA, 11 bp, Zea mays
gaatccctttt

SEQ ID NO: 6674 - DNA, 14 bp, Zea mays
ggcccttttgctga

SEQ ID NO: 6675 - DNA, 46 bp, Zea mays
  misc_feature (1)..(12): n is a, c, g, or t
nnnnnnnnnnnncggcggcggagttttcggcttctgatacagtgat

SEQ ID NO: 6676 - DNA, 46 bp, Zea mays
catcctctgccgcggcggcggagttttcggcttctgatacagtgat

SEQ ID NO: 6677 - DNA, 11 bp, Zea mays
cgcctcacgcg

SEQ ID NO: 6678 - DNA, 10 bp, Zea mays
tctttttttt

SEQ ID NO: 6679 - DNA, 18 bp, Zea mays
ggccggccgccgggaaag

SEQ ID NO: 6680 - DNA, 21 bp, Zea mays
tgcgggaagctgaagatacgg

SEQ ID NO: 6681 - DNA, 10 bp, Zea mays
attttttttt

SEQ ID NO: 6682 - DNA, 18 bp, Zea mays
gtgtgccgtgtgtgcatg

SEQ ID NO: 6683 - DNA, 13 bp, Zea mays
ggcgcgctctcca

SEQ ID NO: 6684 - DNA, 13 bp, Zea mays
agcgctctctcca

SEQ ID NO: 6685 - DNA, 23 bp, Zea mays
gagaattgttctgcactcaccca

SEQ ID NO: 6686 - DNA, 15 bp, Zea mays
gagaattgttctgca

SEQ ID NO: 6687 - DNA, 78 bp, Zea mays
gtaattgctaataaaatttgaccaacttattaaaagcaatgctcagcttgaacccctattattgatcagccttacaat

SEQ ID NO: 6688 - DNA, 12 bp, Zea mays
cgggcgcgggcg

SEQ ID NO: 6689 - DNA, 12 bp, Zea mays
aaggcgcacgag

SEQ ID NO: 6690 - DNA, 36 bp, Zea mays
tagcgagtgcgaggcttccaccaccaccagtagcga

SEQ ID NO: 6691 - DNA, 19 bp, Zea mays
atattctcgaagatagaaa

SEQ ID NO: 6692 - DNA, 17 bp, Zea mays
acgaacgtactcctccg

SEQ ID NO: 6693 - DNA, 19 bp, Zea mays
ccgccgcacagttgcgata

SEQ ID NO: 6694 - DNA, 19 bp, Zea mays
  misc_feature (18)..(19): n is a, c, g, or t
ccgccgcacagttgcgann

SEQ ID NO: 6695 - DNA, 17 bp, Zea mays
cgaaatgcatctaacag

SEQ ID NO: 6696 - DNA, 28 bp, Zea mays
cttctattccagtaatgtttttagaacc

SEQ ID NO: 6697 - DNA, 28 bp, Zea mays
  misc_feature (1)..(1): n is a, c, g, or t
  misc_feature (4)..(4): n is a, c, g, or t
  misc_feature (9)..(10): n is a, c, g, or t
  misc_feature (27)..(28): n is a, c, g, or t
nttntattnnagtaatgtttttagaann

SEQ ID NO: 6698 - DNA, 28 bp, Zea mays
  misc_feature (19)..(22): n is a, c, g, or t
cttctattccagtaatgtnnnnagaacc

SEQ ID NO: 6699 - DNA, 16 bp, Zea mays
ctctactcttaggctc

SEQ ID NO: 6700 - DNA, 14 bp, Zea mays
ctactcttaggctc

SEQ ID NO: 6701 - DNA, 14 bp, Zea mays
atttcattatgacg

SEQ ID NO: 6702 - DNA, 16 bp, Zea mays
gatgaggtagagttat

SEQ ID NO: 6703 - DNA, 16 bp, Zea mays
gatgaggcagagttat

SEQ ID NO: 6704 - DNA, 15 bp, Zea mays
gatgaggagagttat

SEQ ID NO: 6705 - DNA, 14 bp, Zea mays
aatggtttggcata

SEQ ID NO: 6706 - DNA, 17 bp, Zea mays
ctttcctggcccggggt

SEQ ID NO: 6707 - DNA, 29 bp, Zea mays
atggggattacaagaaaaagaaatcggaa

SEQ ID NO: 6708 - DNA, 29 bp, Zea mays
atggggattacaagaaaaagaaatcagaa

SEQ ID NO: 6709 - DNA, 20 bp, Zea mays
acggcagtgccctcggcggt

SEQ ID NO: 6710 - DNA, 15 bp, Zea mays
tagtctctttgatga

SEQ ID NO: 6711 - DNA, 12 bp, Zea mays
ccctccccctcc

SEQ ID NO: 6712 - DNA, 15 bp, Zea mays
tgtttttttatttga

SEQ ID NO: 6713 - DNA, 10 bp, Zea mays
gtatggtaat

SEQ ID NO: 6714 - DNA, 10 bp, Zea mays
  misc_feature (1)..(3): n is a, c, g, or t
nnntggtaat

SEQ ID NO: 6715 - DNA, 38 bp, Zea mays
atttgatcgcacattttaggcacatgtaagataaattt

SEQ ID NO: 6716 - DNA, 38 bp, Zea mays
ctctgcatgcagagatatccgtttcgcgtatcctgtgg

SEQ ID NO: 6717 - DNA, 38 bp, Zea mays
  misc_feature (8)..(8): n is a, c, g, or t
ctctgcangcagagatatccgtttcgtgtatcctgtgg

SEQ ID NO: 6718 - DNA, 18 bp, Zea mays
cctggtacttccctgcga

SEQ ID NO: 6719 - DNA, 42 bp, Zea mays
gatgcgattttggttagcggaccttggcttatgggaattctg

SEQ ID NO: 6720 - DNA, 13 bp, Zea mays
aagaacaaggcgg

SEQ ID NO: 6721 - DNA, 13 bp, Zea mays
aaggacaaggcgg

SEQ ID NO: 6722 - DNA, 16 bp, Zea mays
  misc_feature (15)..(16): n is a, c, g, or t
cctgcaaacggaaann

SEQ ID NO: 6723 - DNA, 10 bp, Zea mays
cctgcaaacg

SEQ ID NO: 6724 - DNA, 16 bp, Zea mays
cctgcaaacggatatc

SEQ ID NO: 6725 - DNA, 65 bp, Zea mays
  misc_feature (34)..(34): n is a, c, g, or t
  misc_feature (41)..(41): n is a, c, g, or t
ccccccggttctattattgttactgtatagctgnaattagnccaagtgtacagctgaatctacta

SEQ ID NO: 6726 - DNA, 14 bp, Zea mays
cgttatagtattta

SEQ ID NO: 6727 - DNA, 14 bp, Zea mays
  misc_feature (3)..(3): n is a, c, g, or t
  misc_feature (9)..(10): n is a, c, g, or t
cgntatggnnttta

SEQ ID NO: 6728 - DNA, 19 bp, Zea mays
ttttctggctgcaggccag

SEQ ID NO: 6729 - DNA, 41 bp, Zea mays
tgcgttatttttcttgaatatactgtcggtacggtagtagc

SEQ ID NO: 6730 - DNA, 13 bp, Zea mays
cgcgtacgtacgt

SEQ ID NO: 6731 - DNA, 19 bp, Zea mays
gccgctgccgcctgccgtg

SEQ ID NO: 6732 - DNA, 45 bp, Zea mays
agccaagtaagtaaatgtggtctactgatacaaatgccaaatatt

SEQ ID NO: 6733 - DNA, 11 bp, Zea mays
gctttttcata

SEQ ID NO: 6734 - DNA, 13 bp, Zea mays
ttttttccttttt

SEQ ID NO: 6735 - DNA, 13 bp, Zea mays
ttgttcccttttt

SEQ ID NO: 6736 - DNA, 14 bp, Zea mays
tttttttccttttt

SEQ ID NO: 6737 - DNA, 15 bp, Zea mays
gaaagaaagaaaaac

SEQ ID NO: 6738 - DNA, 15 bp, Zea mays
gttggccaagcccga

SEQ ID NO: 6739 - DNA, 15 bp, Zea mays
tagctcagactcaga

SEQ ID NO: 6740 - DNA, 15 bp, Zea mays
cagctcagacttaga

SEQ ID NO: 6741 - DNA, 18 bp, Zea mays
cggtgggtgcaccaacac

SEQ ID NO: 6742 - DNA, 16 bp, Zea mays
cgggttgcaccaacac

SEQ ID NO: 6743 - DNA, 18 bp, Zea mays
  misc_feature (13)..(13): n is a, c, g, or t
cggtgggtgcacntgcac

SEQ ID NO: 6744 - DNA, 12 bp, Zea mays
gggtgggtgcac

SEQ ID NO: 6745 - DNA, 19 bp, Zea mays
cgatgggtgctgggtgcac

SEQ ID NO: 6746 - DNA, 10 bp, Zea mays
cattctctct

SEQ ID NO: 6747 - DNA, 21 bp, Zea mays
accattctttttccttttttt

SEQ ID NO: 6748 - DNA, 12 bp, Zea mays
atgcatatgcat

SEQ ID NO: 6749 - DNA, 10 bp, Zea mays
agtgcatata

SEQ ID NO: 6750 - DNA, 22 bp, Zea mays
taatcttggccgccgaaaatga

SEQ ID NO: 6751 - DNA, 17 bp, Zea mays
cgtccagcccatgcccg

SEQ ID NO: 6752 - DNA, 10 bp, Zea mays
ctgagcctga

SEQ ID NO: 6753 - DNA, 14 bp, Zea mays
ttttcagaaaagct

SEQ ID NO: 6754 - DNA, 14 bp, Zea mays
gccgagtcgagcca

SEQ ID NO: 6755 - DNA, 11 bp, Zea mays
tggttggactg

SEQ ID NO: 6756 - DNA, 14 bp, Zea mays
ctgtgaaaaaagcc

SEQ ID NO: 6757 - DNA, 14 bp, Zea mays
ttgtgaaaaaaacc

SEQ ID NO: 6758 - DNA, 19 bp, Zea mays
ttgcacacgtacgggcggt

SEQ ID NO: 6759 - DNA, 15 bp, Zea mays
gaggaggacgcgggg

SEQ ID NO: 6760 - DNA, 13 bp, Zea mays
cattgtctgaata

SEQ ID NO: 6761 - DNA, 35 bp, Zea mays
gtgtgtgcacgcgcaatcctagctaataaatagat

SEQ ID NO: 6762 - DNA, 35 bp, Zea mays
gtgtgtgcacgcgcaaatcctaataataaatagat

SEQ ID NO: 6763 - DNA, 10 bp, Zea mays
gtgccttgct

SEQ ID NO: 6764 - DNA, 13 bp, Zea mays
agagaagcttggc

SEQ ID NO: 6765 - DNA, 11 bp, Zea mays
  misc_feature (1)..(1): n is a, c, g, or t
ntccgagttcc

SEQ ID NO: 6766 - DNA, 11 bp, Zea mays
ttccgagttcc

SEQ ID NO: 6767 - DNA, 15 bp, Zea mays
tgctagtcccagcat

SEQ ID NO: 6768 - DNA, 15 bp, Zea mays
  misc_feature (8)..(8): n is a, c, g, or t
cgctagcnccaacgt

SEQ ID NO: 6769 - DNA, 47 bp, Zea mays
cgctagtcccaacacgggaaaaggagattttgcgctagtcccaacgc

SEQ ID NO: 6770 - DNA, 10 bp, Zea mays
ctcctctcct

SEQ ID NO: 6771 - DNA, 32 bp, Zea mays
ttctcctctcctctccttccatgcacattatt

SEQ ID NO: 6772 - DNA, 10 bp, Zea mays
agagagagag

SEQ ID NO: 6773 - DNA, 19 bp, Zea mays
tagtccttgggtctttttg

SEQ ID NO: 6774 - DNA, 20 bp, Zea mays
gcagtatatgatacaatgta

SEQ ID NO: 6775 - DNA, 12 bp, Zea mays
ggggggtttttt

SEQ ID NO: 6776 - DNA, 11 bp, Zea mays
ggggggttttg

SEQ ID NO: 6777 - DNA, 20 bp, Zea mays
agagttacatttttgtagct

SEQ ID NO: 6778 - DNA, 20 bp, Zea mays
cgagttacttttttgtagct

SEQ ID NO: 6779 - DNA, 12 bp, Zea mays
gtgtgtgtgtgt

SEQ ID NO: 6780 - DNA, 12 bp, Zea mays
gctgctagcatc

SEQ ID NO: 6781 - DNA, 12 bp, Zea mays
ctagctagcatc

SEQ ID NO: 6782 - DNA, 11 bp, Zea mays
ctagcatcatc

SEQ ID NO: 6783 - DNA, 12 bp, Zea mays
gttgttgttgtt

SEQ ID NO: 6784 - DNA, 56 bp, Zea mays
ccattcgtcgaacacgtggcatgcattactacttgcttctctcatgacccggcggt

SEQ ID NO: 6785 - DNA, 13 bp, Zea mays
cgggctgcggctg

SEQ ID NO: 6786 - DNA, 20 bp, Zea mays
cgtgatggttttttttcttg

SEQ ID NO: 6787 - DNA, 21 bp, Zea mays
cgtgatggtttttttttcttg

SEQ ID NO: 6788 - DNA, 19 bp, Zea mays
cgtgatagtttttttcttg

SEQ ID NO: 6789 - DNA, 17 bp, Zea mays
agtccttgctagccctg

SEQ ID NO: 6790 - DNA, 17 bp, Zea mays
agtcctcgctagccctc

SEQ ID NO: 6791 - DNA, 14 bp, Zea mays
ctctctcttactta

SEQ ID NO: 6792 - DNA, 12 bp, Zea mays
ctctcttactta

SEQ ID NO: 6793 - DNA, 19 bp, Zea mays
ctcccccctccctctctta

SEQ ID NO: 6794 - DNA, 16 bp, Zea mays
ccccctccctctcttg

SEQ ID NO: 6795 - DNA, 10 bp, Zea mays
tattatggaa

SEQ ID NO: 6796 - DNA, 12 bp, Zea mays
cagggaagctta

SEQ ID NO: 6797 - DNA, 14 bp, Zea mays
tttggtcttgaaca

SEQ ID NO: 6798 - DNA, 14 bp, Zea mays
tttggtcttgacca

SEQ ID NO: 6799 - DNA, 15 bp, Zea mays
tcagatccagagcct

SEQ ID NO: 6800 - DNA, 25 bp, Zea mays
agaacagcgaccgctgagaacataa

SEQ ID NO: 6801 - DNA, 16 bp, Zea mays
gatccgatcctaattc

SEQ ID NO: 6802 - DNA, 12 bp, Zea mays
attttatagtgt

SEQ ID NO: 6803 - DNA, 10 bp, Zea mays
tttatagtgt

SEQ ID NO: 6804 - DNA, 11 bp, Zea mays
acgatacgact

SEQ ID NO: 6805 - DNA, 14 bp, Zea mays
  misc_feature (12)..(12): n is a, c, g, or t
cgaaagttctanaa

SEQ ID NO: 6806 - DNA, 61 bp, Zea mays
cgaaaaaaacctagccttgtaacaccgacgaaatggacttgtcttgtttcaaatgacacaa

SEQ ID NO: 6807 - DNA, 14 bp, Zea mays
cgaaagttctagaa

SEQ ID NO: 6808 - DNA, 63 bp, Zea mays
  misc_feature (32)..(32): n is a, c, g, or t
  misc_feature (50)..(63): n is a, c, g, or t
gaaaaaaaaaacctagccttgtaacaccgacnacatggacttgtcttgtnnnnnnnnnnnnnn

SEQ ID NO: 6809 - DNA, 11 bp, Zea mays
attttttttgg

SEQ ID NO: 6810 - DNA, 11 bp, Zea mays
ctcatgagtca

SEQ ID NO: 6811 - DNA, 27 bp, Zea mays
tgctgtatactaaatattaacggccca

SEQ ID NO: 6812 - DNA, 11 bp, Zea mays
caacacatgat

SEQ ID NO: 6813 - DNA, 21 bp, Zea mays
gcatgggatcggtccgtcgag

SEQ ID NO: 6814 - DNA, 16 bp, Zea mays
actaaaaaataagtcc

SEQ ID NO: 6815 - DNA, 16 bp, Zea mays
actaaaaaataagtca

SEQ ID NO: 6816 - DNA, 12 bp, Zea mays
aggtctgggtat

SEQ ID NO: 6817 - DNA, 19 bp, Zea mays
tgcggttcgatctacctgc

SEQ ID NO: 6818 - DNA, 14 bp, Zea mays
acccattttttatt

SEQ ID NO: 6819 - DNA, 15 bp, Zea mays
atccatttttttatt

SEQ ID NO: 6820 - DNA, 12 bp, Zea mays
cggcaatgcggc

SEQ ID NO: 6821 - DNA, 16 bp, Zea mays
caaaccagtttgaaca

SEQ ID NO: 6822 - DNA, 29 bp, Zea mays
gtcagatgtctcagatctcgcaaaagaag

SEQ ID NO: 6823 - DNA, 29 bp, Zea mays
  misc_feature (1)..(16): n is a, c, g, or t
nnnnnnnnnnnnnnnnctcgcaaaagaag

SEQ ID NO: 6824 - DNA, 46 bp, Zea mays
cagcagcttgccgtcgagactcaccgacgtgcttttgacggaccac

SEQ ID NO: 6825 - DNA, 24 bp, Zea mays
acagccagatgaaccagttcgttt

SEQ ID NO: 6826 - DNA, 19 bp, Zea mays
attcttcagagcttaattg

SEQ ID NO: 6827 - DNA, 23 bp, Zea mays
atctgctcagctgtctatagttt

SEQ ID NO: 6828 - DNA, 12 bp, Zea mays
agcggcaggggc

SEQ ID NO: 6829 - DNA, 10 bp, Zea mays
gacatcaatt

SEQ ID NO: 6830 - DNA, 10 bp, Zea mays
  misc_feature (7)..(7): n is a, c, g, or t
gacatcnatt

SEQ ID NO: 6831 - DNA, 12 bp, Zea mays
ctccagctccag

SEQ ID NO: 6832 - DNA, 17 bp, Zea mays
ttggacgacgcgcggcg

SEQ ID NO: 6833 - DNA, 17 bp, Zea mays
  misc_feature (1)..(2): n is a, c, g, or t
nnggacgacgcgcggcg

SEQ ID NO: 6834 - DNA, 10 bp, Zea mays
accaattaaa

SEQ ID NO: 6835 - DNA, 11 bp, Zea mays
gcactgcatgg

SEQ ID NO: 6836 - DNA, 16 bp, Zea mays
acgataatgataaacg

SEQ ID NO: 6837 - DNA, 15 bp, Zea mays
aatggtcgacggtcg

SEQ ID NO: 6838 - DNA, 18 bp, Zea mays
gagtgcaaggtcaagcta

SEQ ID NO: 6839 - DNA, 18 bp, Zea mays
gagtgcaaggtcaagctg

SEQ ID NO: 6840 - DNA, 10 bp, Zea mays
cggcacgcag

SEQ ID NO: 6841 - DNA, 10 bp, Zea mays
cgggacgcag

SEQ ID NO: 6842 - DNA, 10 bp, Zea mays
cgggacatag

SEQ ID NO: 6843 - DNA, 16 bp, Zea mays
acatagatgttttttg

SEQ ID NO: 6844 - DNA, 32 bp, Zea mays
tttaagggctagtttgacaatctcatttgttc

SEQ ID NO: 6845 - DNA, 32 bp, Zea mays
cccccttcatttcccttaagcaatggcaacat

SEQ ID NO: 6846 - DNA, 32 bp, Zea mays
tctgaaggctactttggcaacctcatttgttc

SEQ ID NO: 6847 - DNA, 32 bp, Zea mays
  misc_feature (29)..(32): n is a, c, g, or t
ctaagcaatggcagtatctcaaatgtttnnnn

SEQ ID NO: 6848 - DNA, 37 bp, Zea mays
aagaacactttaaaaaaagggagttgccaaactagcc

SEQ ID NO: 6849 - DNA, 10 bp, Zea mays
cattttctct

SEQ ID NO: 6850 - DNA, 18 bp, Zea mays
gtggtggattgtgcttgc

SEQ ID NO: 6851 - DNA, 18 bp, Zea mays
cacacacacacacacacg

SEQ ID NO: 6852 - DNA, 15 bp, Zea mays
ggaagcacttaactt

SEQ ID NO: 6853 - DNA, 34 bp, Zea mays
aattcgtgacaaaattaatataatttaatcatgt

SEQ ID NO: 6854 - DNA, 34 bp, Zea mays
aatttgtgacaaaattaatgtaatctaatcatgt

SEQ ID NO: 6855 - DNA, 14 bp, Zea mays
ttgatgccaaaacc

SEQ ID NO: 6856 - DNA, 10 bp, Zea mays
cccccccccc

SEQ ID NO: 6857 - DNA, 10 bp, Zea mays
atgaccatga

SEQ ID NO: 6858 - DNA, 23 bp, Zea mays
gtgataacctacagcttaatgat

SEQ ID NO: 6859 - DNA, 10 bp, Zea mays
caaaaaaaaa

SEQ ID NO: 6860 - DNA, 11 bp, Zea mays
ggggtgatgga

SEQ ID NO: 6861 - DNA, 18 bp, Zea mays
  misc_feature (17)..(18): n is a, c, g, or t
actgaaatgagtcctgnn

SEQ ID NO: 6862 - DNA, 18 bp, Zea mays
actgaaatgagtccttgg

SEQ ID NO: 6863 - DNA, 14 bp, Zea mays
gatgtgctgtggta

SEQ ID NO: 6864 - DNA, 16 bp, Zea mays
gatgtgttgtgtggta

SEQ ID NO: 6865 - DNA, 14 bp, Zea mays
gggcaagccgcagc

SEQ ID NO: 6866 - DNA, 12 bp, Zea mays
ccggccccggcc

SEQ ID NO: 6867 - DNA, 12 bp, Zea mays
ccggccacggcc

SEQ ID NO: 6868 - DNA, 12 bp, Zea mays
gcagcagcagca

SEQ ID NO: 6869 - DNA, 11 bp, Zea mays
cctcctcctta

SEQ ID NO: 6870 - DNA, 16 bp, Zea mays
attgaatgtatgcggg

SEQ ID NO: 6871 - DNA, 40 bp, Zea mays
ttgctcatcgatcgatcacgtatggcggcgtcccgcatga

SEQ ID NO: 6872 - DNA, 36 bp, Zea mays
ctcatcgatcacgtatggcgtcccggtcccgcatgc

SEQ ID NO: 6873 - DNA, 13 bp, Zea mays
  misc_feature (1)..(1): n is a, c, g, or t
ntgcgccgatcag

SEQ ID NO: 6874 - DNA, 13 bp, Zea mays
ctgcgccgatcag

SEQ ID NO: 6875 - DNA, 27 bp, Zea mays
tcttcttcttcactgtctgcgtctgcg

SEQ ID NO: 6876 - DNA, 10 bp, Zea mays
attttttttt

SEQ ID NO: 6877 - DNA, 11 bp, Zea mays
ttttttttttt

SEQ ID NO: 6878 - DNA, 20 bp, Zea mays
gtttattattatttttctca

SEQ ID NO: 6879 - DNA, 41 bp, Zea mays
tcagaatccaaacacatatttggtcttattaggatttcagt

SEQ ID NO: 6880 - DNA, 15 bp, Zea mays
acgttgtgcaggaga

SEQ ID NO: 6881 - DNA, 15 bp, Zea mays
ccatgagcccatgag

SEQ ID NO: 6882 - DNA, 15 bp, Zea mays
  misc_feature (1)..(1): n is a, c, g, or t
ncatgagcccatgag

SEQ ID NO: 6883 - DNA, 25 bp, Zea mays
attattattattattattattattc

SEQ ID NO: 6884 - DNA, 25 bp, Zea mays
attattattattattattattatta

SEQ ID NO: 6885 - DNA, 44 bp, Zea mays
  misc_feature (1)..(3): n is a, c, g, or t
nnnattattattattattattattattattattattattattat

SEQ ID NO: 6886 - DNA, 21 bp, Zea mays
tattattattattattattat

SEQ ID NO: 6887 - DNA, 44 bp, Zea mays
  misc_feature (1)..(1): n is a, c, g, or t
nttattattattattattattattattattattattattattat

SEQ ID NO: 6888 - DNA, 44 bp, Zea mays
cttattattattattattattattattattattattattattat

SEQ ID NO: 6889 - DNA, 21 bp, Zea mays
tattattattattattattat

SEQ ID NO: 6890 - DNA, 42 bp, Zea mays
  misc_feature (19)..(19): n is a, c, g, or t
  misc_feature (39)..(40): n is a, c, g, or t
agatcatggtttcctcggntcatccacaaaattgaatanntg

SEQ ID NO: 6891 - DNA, 42 bp, Zea mays
agatcatggtttcctcggttcatccacaaaattgaatagttg

SEQ ID NO: 6892 - DNA, 35 bp, Zea mays
agagaagaagggagcatcctatcagtaactgaagt

SEQ ID NO: 6893 - DNA, 37 bp, Zea mays
agagaagaagggagcacatcctatcagtaactgaagt

SEQ ID NO: 6894 - DNA, 35 bp, Zea mays
agagaagaagggaacaccctatcagtaactgaagt

SEQ ID NO: 6895 - DNA, 14 bp, Zea mays
aatttataattgca

SEQ ID NO: 6896 - DNA, 10 bp, Zea mays
tgattgcgag

SEQ ID NO: 6897 - DNA, 10 bp, Zea mays
acgtcttgtc

SEQ ID NO: 6898 - DNA, 67 bp, Zea mays
tattcacggtgtcgttgagagcgcaattgtactgtccaaggggctctgggtgatgacgggatcctct

SEQ ID NO: 6899 - DNA, 31 bp, Zea mays
aagtcagcgccattggaggttttggaggaat

SEQ ID NO: 6900 - DNA, 35 bp, Zea mays
tgtttcttgtctgctaacacctgggattgtagacg

SEQ ID NO: 6901 - DNA, 41 bp, Zea mays
cgccataccggatgctccaccgctgttccctatccacatca

SEQ ID NO: 6902 - DNA, 12 bp, Zea mays
tcaatcttatgt

SEQ ID NO: 6903 - DNA, 11 bp, Zea mays
gccagcttaca

SEQ ID NO: 6904 - DNA, 11 bp, Zea mays
ttacggtatta

SEQ ID NO: 6905 - DNA, 10 bp, Zea mays
attgacatat

SEQ ID NO: 6906 - DNA, 10 bp, Zea mays
ctttggttgg

SEQ ID NO: 6907 - DNA, 11 bp, Zea mays
aattaactatt

SEQ ID NO: 6908 - DNA, 20 bp, Zea mays
tgccagcaagctggtaaatt

SEQ ID NO: 6909 - DNA, 19 bp, Zea mays
gccagcaagctggtaaatt

SEQ ID NO: 6910 - DNA, 15 bp, Zea mays
cctggctgctcgtac

SEQ ID NO: 6911 - DNA, 15 bp, Zea mays
tgcccgcctacatga

SEQ ID NO: 6912 - DNA, 11 bp, Zea mays
tatggggtaag

SEQ ID NO: 6913 - DNA, 11 bp, Zea mays
tatggggtaag

SEQ ID NO: 6914 - DNA, 11 bp, Zea mays
cagggggtaag

SEQ ID NO: 6915 - DNA, 24 bp, Zea mays
gtctagctattatatcctgtcgat

SEQ ID NO: 6916 - DNA, 26 bp, Zea mays
cctggatcggagaccgccaagggctt

SEQ ID NO: 6917 - DNA, 26 bp, Zea mays
cctggatcggagaccgccaaggactt

SEQ ID NO: 6918 - DNA, 26 bp, Zea mays
  misc_feature (17)..(25): n is a, c, g, or t
cctggatcggagaccgnnnnnnnnnt

SEQ ID NO: 6919 - DNA, 26 bp, Zea mays
  misc_feature (16)..(20): n is a, c, g, or t
cctggatcggagaccnnnnngggctt

SEQ ID NO: 6920 - DNA, 26 bp, Zea mays
  misc_feature (16)..(22): n is a, c, g, or t
cctggatcggagaccnnnnnnngctt

SEQ ID NO: 6921 - DNA, 10 bp, Zea mays
gagcatctgt

SEQ ID NO: 6922 - DNA, 12 bp, Zea mays
ggctcggctccg

SEQ ID NO: 6923 - DNA, 16 bp, Zea mays
agaccccagctgttta

SEQ ID NO: 6924 - DNA, 10 bp, Zea mays
tgggttgggt

SEQ ID NO: 6925 - DNA, 14 bp, Zea mays
tgggttgggtgtgt

SEQ ID NO: 6926 - DNA, 23 bp, Zea mays
ctagttttctctctctctctttt

SEQ ID NO: 6927 - DNA, 23 bp, Zea mays
  misc_feature (1)..(3): n is a, c, g, or t
nnngttttctctctctctctttt

SEQ ID NO: 6928 - DNA, 36 bp, Zea mays
caggctgcctcagccgaagcagcagcacatcgtcgc

SEQ ID NO: 6929 - DNA, 36 bp, Zea mays
taggctgcctcagccgaagcagcagcacatcgtcgt

SEQ ID NO: 6930 - DNA, 14 bp, Zea mays
ttagtacgttgtta

SEQ ID NO: 6931 - DNA, 10 bp, Zea mays
ctatattata

SEQ ID NO: 6932 - DNA, 47 bp, Zea mays
cgatgtactcacgagcttgtcgatcaaccctttagttatttgcttca

SEQ ID NO: 6933 - DNA, 16 bp, Zea mays
  misc_feature (9)..(9): n is a, c, g, or t
agcagccanggagcgg

SEQ ID NO: 6934 - DNA, 16 bp, Zea mays
agcagccaaggagcgg

SEQ ID NO: 6935 - DNA, 11 bp, Zea mays
gggcacattgc

SEQ ID NO: 6936 - DNA, 48 bp, Zea mays
gaaaagaagatgatttcgttcgttttgagcagtatgttttgagcatga

SEQ ID NO: 6937 - DNA, 10 bp, Zea mays
ttacgtctcg

SEQ ID NO: 6938 - DNA, 46 bp, Zea mays
taaggtgccacttcccttagcgtctgaaatgggttcactttgagct

SEQ ID NO: 6939 - DNA, 22 bp, Zea mays
atacggaaaccctgcattgcct

SEQ ID NO: 6940 - DNA, 77 bp, Zea mays
cataataaggactaatttgggaactctatttttctaagggattcctattttaccaagaaaaaatgaactaattaatt

SEQ ID NO: 6941 - DNA, 45 bp, Zea mays
tagaaaaatagaaatcttttggaaaaatggggttcccaaactagc

SEQ ID NO: 6942 - DNA, 45 bp, Zea mays
  misc_feature (2)..(2): n is a, c, g, or t
tngaaaaatagaaatcttttggaaaaatggggttcccaaactagc

SEQ ID NO: 6943 - DNA, 80 bp, Zea mays
gtttctttttagttgtcgttggatagttcaatttcgcactatccagcgacaactaaaacgaaacggagggagtaccataa

SEQ ID NO: 6944 - DNA, 14 bp, Zea mays
catgacaacagttt

SEQ ID NO: 6945 - DNA, 14 bp, Zea mays
  misc_feature (10)..(13): n is a, c, g, or t
catgacaacnnnnt

SEQ ID NO: 6946 - DNA, 10 bp, Zea mays
cttctttaaa

SEQ ID NO: 6947 - DNA, 11 bp, Zea mays
gaaaaaaaagg

SEQ ID NO: 6948 - DNA, 10 bp, Zea mays
gaaaaaaaag

SEQ ID NO: 6949 - DNA, 11 bp, Zea mays
  misc_feature (1)..(2): n is a, c, g, or t
  misc_feature (10)..(10): n is a, c, g, or t
nnaaaaaaang

SEQ ID NO: 6950 - DNA, 11 bp, Zea mays
  misc_feature (1)..(2): n is a, c, g, or t
nnaaaaaaaag

SEQ ID NO: 6951 - DNA, 11 bp, Zea mays
aaaaaaaaaag

SEQ ID NO: 6952 - DNA, 15 bp, Zea mays
cctagagaaaacctg

SEQ ID NO: 6953 - DNA, 15 bp, Zea mays
  misc_feature (5)..(5): n is a, c, g, or t
cctanagaaaacctg

SEQ ID NO: 6954 - DNA, 14 bp, Zea mays
gatatattgggatc

SEQ ID NO: 6955 - DNA, 10 bp, Zea mays
atcaaatcaa

SEQ ID NO: 6956 - DNA, 13 bp, Zea mays
gttacctcctctc

SEQ ID NO: 6957 - DNA, 11 bp, Zea mays
gttacctctca

SEQ ID NO: 6958 - DNA, 10 bp, Zea mays
cgatgacatg

SEQ ID NO: 6959 - DNA, 10 bp, Zea mays
gacatatata

SEQ ID NO: 6960 - DNA, 35 bp, Zea mays
  misc_feature (33)..(33): n is a, c, g, or t
ctctctctctctctctctctctctctctctctntg

SEQ ID NO: 6961 - DNA, 15 bp, Zea mays
cgacgccatgagctc

SEQ ID NO: 6962 - DNA, 15 bp, Zea mays
ggacgccatgagctc

SEQ ID NO: 6963 - DNA, 11 bp, Zea mays
tcatggttcac

SEQ ID NO: 6964 - DNA, 22 bp, Zea mays
ctcgctgtcccgcatgcattct

SEQ ID NO: 6965 - DNA, 15 bp, Zea mays
acaccaacaccaaca

SEQ ID NO: 6966 - DNA, 12 bp, Zea mays
agacgcagaccc

SEQ ID NO: 6967 - DNA, 10 bp, Zea mays
ccgatgggcg

SEQ ID NO: 6968 - DNA, 12 bp, Zea mays
ttcttcccatcg

SEQ ID NO: 6969 - DNA, 11 bp, Zea mays
cgcgcagcgct

SEQ ID NO: 6970 - DNA, 23 bp, Zea mays
agcaacgtgtgtgtatatatatg

SEQ ID NO: 6971 - DNA, 19 bp, Zea mays
tttaaattgccttctgatt

SEQ ID NO: 6972 - DNA, 16 bp, Zea mays
cctgctcgatcaattg

SEQ ID NO: 6973 - DNA, 12 bp, Zea mays
ctctctgcaact

SEQ ID NO: 6974 - DNA, 12 bp, Zea mays
  misc_feature (7)..(10): n is a, c, g, or t
ctctctnnnnct

SEQ ID NO: 6975 - DNA, 16 bp, Zea mays
agatggagcgtgcagg

SEQ ID NO: 6976 - DNA, 20 bp, Zea mays
agccatggaatccagggcgc

SEQ ID NO: 6977 - DNA, 20 bp, Zea mays
tagaggaggcgaggagctgg

SEQ ID NO: 6978 - DNA, 39 bp, Zea mays
gcggttccgcgacatccggctaatcaagagaaagctatg

SEQ ID NO: 6979 - DNA, 16 bp, Zea mays
gcttagctagcactct

SEQ ID NO: 6980 - DNA, 15 bp, Zea mays
gctgctcctccagct

SEQ ID NO: 6981 - DNA, 10 bp, Zea mays
gttcaccacg

SEQ ID NO: 6982 - DNA, 12 bp, Zea mays
gcgtcagcgtca

SEQ ID NO: 6983 - DNA, 10 bp, Zea mays
gttttttttt

SEQ ID NO: 6984 - DNA, 10 bp, Zea mays
gcacaagagc

SEQ ID NO: 6985 - DNA, 12 bp, Zea mays
  misc_feature (12)..(12): n is a, c, g, or t
caaaaaaaaaan

SEQ ID NO: 6986 - DNA, 12 bp, Zea mays
caaaaaaaaaaa

SEQ ID NO: 6987 - DNA, 11 bp, Zea mays
caaaaaaaaaa

SEQ ID NO: 6988 - DNA, 10 bp, Zea mays
caaaaaaaat

SEQ ID NO: 6989 - DNA, 17 bp, Zea mays
tttagtttagctatgag

SEQ ID NO: 6990 - DNA, 12 bp, Zea mays
agcaggagcagg

SEQ ID NO: 6991 - DNA, 28 bp, Zea mays
atgtattgatgagcattacaaactcaaa

SEQ ID NO: 6992 - DNA, 10 bp, Zea mays
gtgtcgattt

SEQ ID NO: 6993 - DNA, 13 bp, Zea mays
agatcattggcct

SEQ ID NO: 6994 - DNA, 14 bp, Zea mays
gagatggaggcgcg

SEQ ID NO: 6995 - DNA, 12 bp, Zea mays
gctaagatacgt

SEQ ID NO: 6996 - DNA, 12 bp, Zea mays
  misc_feature (2)..(2): n is a, c, g, or t
gntaagatacgt

SEQ ID NO: 6997 - DNA, 10 bp, Zea mays
ttaatggact

SEQ ID NO: 6998 - DNA, 10 bp, Zea mays
tttgctctcc

SEQ ID NO: 6999 - DNA, 12 bp, Zea mays
gtcatggtcatg

SEQ ID NO: 7000 - DNA, 31 bp, Zea mays
gatcacgcttcggcctcccctgcttctcctc

SEQ ID NO: 7001 - DNA, 31 bp, Zea mays
  misc_feature (1)..(2): n is a, c, g, or t
nntcacgcttcggcctcccctgcttctcctc

SEQ ID NO: 7002 - DNA, 31 bp, Zea mays
  misc_feature (1)..(5): n is a, c, g, or t
nnnnncgcttcggcctcccctgcttctcctc

SEQ ID NO: 7003 - DNA, 31 bp, Zea mays
  misc_feature (1)..(4): n is a, c, g, or t
nnnnacgcttcggcctcccctgcttctcctc

SEQ ID NO: 7004 - DNA, 11 bp, Zea mays
tacacctagca

SEQ ID NO: 7005 - DNA, 10 bp, Zea mays
tgctgattgc

SEQ ID NO: 7006 - DNA, 14 bp, Zea mays
aagggtgtcggccg

SEQ ID NO: 7007 - DNA, 15 bp, Zea mays
ccgccgccgccgccg

SEQ ID NO: 7008 - DNA, 16 bp, Zea mays
gctactgctactgcta

SEQ ID NO: 7009 - DNA, 13 bp, Zea mays
actgctagtgcta

SEQ ID NO: 7010 - DNA, 10 bp, Zea mays
gctactgctg

SEQ ID NO: 7011 - DNA, 16 bp, Zea mays
gctactgctactgctg

SEQ ID NO: 7012 - DNA, 12 bp, Zea mays
tgaatgccaata

SEQ ID NO: 7013 - DNA, 12 bp, Zea mays
tgaaagccaata

SEQ ID NO: 7014 - DNA, 10 bp, Zea mays
ccaaatttag

SEQ ID NO: 7015 - DNA, 34 bp, Zea mays
gtcaatggtcgttagccacccgtgattgccgccg

SEQ ID NO: 7016 - DNA, 34 bp, Zea mays
attaatggtcgtcagccacccgtgattgtcgccg

SEQ ID NO: 7017 - DNA, 50 bp, Zea mays
ggtccggcccttcagtccctcggccttgccgagaaaggacttgcgaccgc

SEQ ID NO: 7018 - DNA, 50 bp, Zea mays
ggtccgccccttcagtccctcggccttgccgagaaaggacttgcgaccgc

SEQ ID NO: 7019 - DNA, 13 bp, Zea mays
cgcgccggttagg

SEQ ID NO: 7020 - DNA, 13 bp, Zea mays
cgcgccggttagg

SEQ ID NO: 7021 - DNA, 13 bp, Zea mays
gcagttttttttt

SEQ ID NO: 7022 - DNA, 15 bp, Zea mays
gcagttttttttttt

SEQ ID NO: 7023 - DNA, 13 bp, Zea mays
aaattattttttt

SEQ ID NO: 7024 - DNA, 16 bp, Zea mays
agtccaactgtccaac

SEQ ID NO: 7025 - DNA, 29 bp, Zea mays
tatatggctttatgttgatatcttgttta

SEQ ID NO: 7026 - DNA, 36 bp, Zea mays
atgcttgttacttgttagcaaaccgatgtgtgcatg

SEQ ID NO: 7027 - DNA, 13 bp, Zea mays
gtgaggaggagga

SEQ ID NO: 7028 - DNA, 13 bp, Zea mays
gtgaggaggaggg

SEQ ID NO: 7029 - DNA, 11 bp, Zea mays
ccgtgcaggcg

SEQ ID NO: 7030 - DNA, 87 bp, Zea mays
ttcttcttcttcttcttcttcttcttcttcttcttcttcttcttcttcttcttcttcttcttcttcttcttcttcttcttcttcttc

SEQ ID NO: 7031 - DNA, 15 bp, Zea mays
ttcttcttcttcttc

SEQ ID NO: 7032 - DNA, 11 bp, Zea mays
catacacaatg

SEQ ID NO: 7033 - DNA, 28 bp, Zea mays
aaacttgaaataggtcaaacaaacaaac

SEQ ID NO: 7034 - DNA, 10 bp, Zea mays
tcgtcgcgct

SEQ ID NO: 7035 - DNA, 11 bp, Zea mays
aaaaaaatttc

SEQ ID NO: 7036 - DNA, 10 bp, Zea mays
aaaaaatttc

SEQ ID NO: 7037 - DNA, 10 bp, Zea mays
gaaaaaattg

SEQ ID NO: 7038 - DNA, 20 bp, Zea mays
atttctctgtttagttgttt

SEQ ID NO: 7039 - DNA, 20 bp, Zea mays
  misc_feature (14)..(14): n is a, c, g, or t
atttctctgtttanttgttt

SEQ ID NO: 7040 - DNA, 20 bp, Zea mays
  misc_feature (3)..(3): n is a, c, g, or t
  misc_feature (11)..(11): n is a, c, g, or t
  misc_feature (16)..(16): n is a, c, g, or t
  misc_feature (18)..(19): n is a, c, g, or t
atntctctgtntagtngnnt

SEQ ID NO: 7041 - DNA, 20 bp, Zea mays
  misc_feature (5)..(5): n is a, c, g, or t
  misc_feature (7)..(7): n is a, c, g, or t
  misc_feature (17)..(17): n is a, c, g, or t
  misc_feature (20)..(20): n is a, c, g, or t
atttntntgtttagttnttn

SEQ ID NO: 7042 - DNA, 20 bp, Zea mays
  misc_feature (18)..(18): n is a, c, g, or t
atttctctgtttagttgntt

SEQ ID NO: 7043 - DNA, 12 bp, Zea mays
tttttttttctt

SEQ ID NO: 7044 - DNA, 15 bp, Zea mays
atttatttatttctt

SEQ ID NO: 7045 - DNA, 23 bp, Zea mays
tgcgtctgcgtgtgcgtgtgccc

SEQ ID NO: 7046 - DNA, 12 bp, Zea mays
tctggggtctgg

SEQ ID NO: 7047 - DNA, 12 bp, Zea mays
ttttttttcttt

SEQ ID NO: 7048 - DNA, 10 bp, Zea mays
tttttttttc

SEQ ID NO: 7049 - DNA, 10 bp, Zea mays
tttttttctt

SEQ ID NO: 7050 - DNA, 10 bp, Zea mays
tttttttctt

SEQ ID NO: 7051 - DNA, 16 bp, Zea mays
ttttttttttcttctt

SEQ ID NO: 7052 - DNA, 12 bp, Zea mays
agcagcagcacc

SEQ ID NO: 7053 - DNA, 29 bp, Zea mays
ttgttgccgccagtgagatggcgaagtgt

SEQ ID NO: 7054 - DNA, 25 bp, Zea mays
tgccgccagtgagatggcgaagtgt

SEQ ID NO: 7055 - DNA, 10 bp, Zea mays
tgctttagtt

SEQ ID NO: 7056 - DNA, 10 bp, Zea mays
ctctcattaa

SEQ ID NO: 7057 - DNA, 22 bp, Zea mays
ctctctctctctctctctctct

SEQ ID NO: 7058 - DNA, 20 bp, Zea mays
ctctctctctctctctctct

SEQ ID NO: 7059 - DNA, 14 bp, Zea mays
ctctctctctctct

SEQ ID NO: 7060 - DNA, 18 bp, Zea mays
ctctctctctctctctct

SEQ ID NO: 7061 - DNA, 14 bp, Zea mays
ctcaaactggtatt

SEQ ID NO: 7062 - DNA, 16 bp, Zea mays
gacgcgcctgtttttt

SEQ ID NO: 7063 - DNA, 10 bp, Zea mays
aggacatctt

SEQ ID NO: 7064 - DNA, 33 bp, Zea mays
acaacaggctccccagaggcagcaacaacaaca

SEQ ID NO: 7065 - DNA, 15 bp, Zea mays
gtcctgcggtcctgc

SEQ ID NO: 7066 - DNA, 10 bp, Zea mays
gaagtgatga

SEQ ID NO: 7067 - DNA, 10 bp, Zea mays
  misc_feature (1)..(1): n is a, c, g, or t
naagtgatga

SEQ ID NO: 7068 - DNA, 10 bp, Zea mays
  misc_feature (4)..(4): n is a, c, g, or t
gaantgatga

SEQ ID NO: 7069 - DNA, 22 bp, Zea mays
ccattgtcgtcgtcgtcgtgac

SEQ ID NO: 7070 - DNA, 12 bp, Zea mays
tccttcctttct

SEQ ID NO: 7071 - DNA, 12 bp, Zea mays
ggaggaggagga

SEQ ID NO: 7072 - DNA, 14 bp, Zea mays
ccatggcggaacac

SEQ ID NO: 7073 - DNA, 25 bp, Zea mays
tgaggctgaggctgacgacgctgct

SEQ ID NO: 7074 - DNA, 23 bp, Zea mays
gcgctgaggctgacgacgctgct

SEQ ID NO: 7075 - DNA, 24 bp, Zea mays
gcgctgagggctgacgacgctgct

SEQ ID NO: 7076 - DNA, 20 bp, Zea mays
gcgctgaggctgacgctgct

SEQ ID NO: 7077 - DNA, 20 bp, Zea mays
catcgtccacatgttcatgc

SEQ ID NO: 7078 - DNA, 11 bp, Zea mays
  misc_feature (11)..(11): n is a, c, g, or t
gtttttttttn

SEQ ID NO: 7079 - DNA, 11 bp, Zea mays
ttttttttttg

SEQ ID NO: 7080 - DNA, 11 bp, Zea mays
gtttttttttg

SEQ ID NO: 7081 - DNA, 21 bp, Zea mays
  misc_feature (9)..(9): n is a, c, g, or t
aatgaaaanaaatcctgattg

SEQ ID NO: 7082 - DNA, 21 bp, Zea mays
aatgaaaagaaatcctgattg

SEQ ID NO: 7083 - DNA, 17 bp, Zea mays
tttttcttgcactggta

SEQ ID NO: 7084 - DNA, 10 bp, Zea mays
tactatatgt

SEQ ID NO: 7085 - DNA, 15 bp, Zea mays
acagctgctaattgt

SEQ ID NO: 7086 - DNA, 15 bp, Zea mays
acggcggctaattgt

SEQ ID NO: 7087 - DNA, 11 bp, Zea mays
tgttatcaata

SEQ ID NO: 7088 - DNA, 23 bp, Zea mays
gaaacatatcagaaaatgatctc

SEQ ID NO: 7089 - DNA, 11 bp, Zea mays
atttatttttt

SEQ ID NO: 7090 - DNA, 45 bp, Zea mays
ctagggacaaattaaaaaaaaatccctttcaaaaaaaaaaaaaaa

SEQ ID NO: 7091 - DNA, 45 bp, Zea mays
  misc_feature (27)..(27): n is a, c, g, or t
ctagggacaaattaaaaaaaaatcccnttcaaaaaaaaaaaaaaa

SEQ ID NO: 7092 - DNA, 14 bp, Zea mays
cagcagcagcagac

SEQ ID NO: 7093 - DNA, 21 bp, Zea mays
caggcagcagcagcagcagag

SEQ ID NO: 7094 - DNA, 11 bp, Zea mays
cagcagcagag

SEQ ID NO: 7095 - DNA, 13 bp, Zea mays
actcaccgttctt

SEQ ID NO: 7096 - DNA, 19 bp, Zea mays
gaaggttgatccttgcgtg

SEQ ID NO: 7097 - DNA, 24 bp, Zea mays
aaataaaaggttgatccttgcgtg

SEQ ID NO: 7098 - DNA, 19 bp, Zea mays
  misc_feature (16)..(16): n is a, c, g, or t
aaaggttgatccttgngtg

SEQ ID NO: 7099 - DNA, 21 bp, Zea mays
ggaaaaaaaaagaagaagaaa

SEQ ID NO: 7100 - DNA, 16 bp, Zea mays
  misc_feature (1)..(1): n is a, c, g, or t
ngaaaagaagaagaag

SEQ ID NO: 7101 - DNA, 11 bp, Zea mays
ggaaaaaaaag

SEQ ID NO: 7102 - DNA, 19 bp, Zea mays
  misc_feature (3)..(3): n is a, c, g, or t
  misc_feature (13)..(13): n is a, c, g, or t
  misc_feature (16)..(16): n is a, c, g, or t
  misc_feature (19)..(19): n is a, c, g, or t
ggnaaaaaagaanaanaan

SEQ ID NO: 7103 - DNA, 16 bp, Zea mays
cttcaacaacacatga

SEQ ID NO: 7104 - DNA, 16 bp, Zea mays
cttcaacaacacagga

SEQ ID NO: 7105 - DNA, 10 bp, Zea mays
ctgcgagaga

SEQ ID NO: 7106 - DNA, 10 bp, Zea mays
ctgcgagaga

SEQ ID NO: 7107 - DNA, 36 bp, Zea mays
aattaagaagaagaagaagaagagatcgtttagcta

SEQ ID NO: 7108 - DNA, 33 bp, Zea mays
aattaagaagaagaagaagatatcgtttagcta

SEQ ID NO: 7109 - DNA, 39 bp, Zea mays
aatcaagaagaagaagaagaagaagagatcgtttagcta

SEQ ID NO: 7110 - DNA, 10 bp, Zea mays
ttttggatgt

SEQ ID NO: 7111 - DNA, 13 bp, Zea mays
ttcaccatgctct

SEQ ID NO: 7112 - DNA, 25 bp, Zea mays
ttgcattaatattgtgcatgcgtgc

SEQ ID NO: 7113 - DNA, 21 bp, Zea mays
ttgcattaatattgtgcgtgc

SEQ ID NO: 7114 - DNA, 13 bp, Zea mays
aatttctccagca

SEQ ID NO: 7115 - DNA, 11 bp, Zea mays
cattgcagtac

SEQ ID NO: 7116 - DNA, 11 bp, Zea mays
tagtccagtat

SEQ ID NO: 7117 - DNA, 18 bp, Zea mays
tgtgcctgtgcctgtgcc

SEQ ID NO: 7118 - DNA, 10 bp, Zea mays
atggaaatgc

SEQ ID NO: 7119 - DNA, 21 bp, Zea mays
  misc_feature (12)..(12): n is a, c, g, or t
atttctttcaantgttattgt

SEQ ID NO: 7120 - DNA, 21 bp, Zea mays
atttctttcaattgttattgt

SEQ ID NO: 7121 - DNA, 11 bp, Zea mays
gcccccggcct

SEQ ID NO: 7122 - DNA, 11 bp, Zea mays
  misc_feature (8)..(8): n is a, c, g, or t
gcccccgncct

SEQ ID NO: 7123 - DNA, 11 bp, Zea mays
acccccgtcct

SEQ ID NO: 7124 - DNA, 14 bp, Zea mays
gcgctaagcacgat

SEQ ID NO: 7125 - DNA, 25 bp, Zea mays
ttttgacggatcttttccgccaagt

SEQ ID NO: 7126 - DNA, 25 bp, Zea mays
ttttgacggatattttccgccaagt

SEQ ID NO: 7127 - DNA, 28 bp, Zea mays
cagtagtcaccaatctaagaatggcgac

SEQ ID NO: 7128 - DNA, 35 bp, Zea mays
cctgctgatggagatgcccctccacatgctgccga

SEQ ID NO: 7129 - DNA, 35 bp, Zea mays
cctgcggatggagatgctcctccgcatgctgccgt

SEQ ID NO: 7130 - DNA, 35 bp, Zea mays
cctgcggatggagatgctcctccacatgctgccgt

SEQ ID NO: 7131 - DNA, 14 bp, Zea mays
ctcgctctctgccg

SEQ ID NO: 7132 - DNA, 14 bp, Zea mays
ctcgctcgctgccg

SEQ ID NO: 7133 - DNA, 13 bp, Zea mays
atatatatatatt

SEQ ID NO: 7134 - DNA, 15 bp, Zea mays
atatatatatatatt

SEQ ID NO: 7135 - DNA, 11 bp, Zea mays
tttcttttctt

SEQ ID NO: 7136 - DNA, 13 bp, Zea mays
tttttcttagtga

SEQ ID NO: 7137 - DNA, 13 bp, Zea mays
tttttcttttctt

SEQ ID NO: 7138 - DNA, 17 bp, Zea mays
caagtgactgagctccg

SEQ ID NO: 7139 - DNA, 10 bp, Zea mays
caggttcctc

SEQ ID NO: 7140 - DNA, 15 bp, Zea mays
cggcgtgggcgtggg

SEQ ID NO: 7141 - DNA, 56 bp, Zea mays
tttttttttggttagaatcttgcagttttttttttttggttagaatcttgcagttt

SEQ ID NO: 7142 - DNA, 59 bp, Zea mays
  misc_feature (42)..(42): n is a, c, g, or t
tgctcgactcccatgaactggtctactttggcggtacagccnaagaggcctagactcaa

SEQ ID NO: 7143 - DNA, 32 bp, Zea mays
tggttagtacagcgtgaagcccaaatatattg

SEQ ID NO: 7144 - DNA, 11 bp, Zea mays
gacagatacag

SEQ ID NO: 7145 - DNA, 16 bp, Zea mays
tgccctgttggtggtt

SEQ ID NO: 7146 - DNA, 10 bp, Zea mays
tctggtacac

SEQ ID NO: 7147 - DNA, 14 bp, Zea mays
gacagcccattaca

SEQ ID NO: 7148 - DNA, 16 bp, Zea mays
ggcgacaacttgaact

SEQ ID NO: 7149 - DNA, 19 bp, Zea mays
tcttaactgtactgcgacg

SEQ ID NO: 7150 - DNA, 36 bp, Zea mays
gcgcaggtggcttattgatgggtgctgtcctaaata

SEQ ID NO: 7151 - DNA, 15 bp, Zea mays
gagctcacagctcag

SEQ ID NO: 7152 - DNA, 12 bp, Zea mays
tgaagatggctc

SEQ ID NO: 7153 - DNA, 44 bp, Zea mays
agctataacaggttttgtaaatcaagtgcataattaccacatta

SEQ ID NO: 7154 - DNA, 35 bp, Zea mays
cccaaaaccagaagccctgcctgttcggctggctg

SEQ ID NO: 7155 - DNA, 15 bp, Zea mays
tgtacagcagtattc

SEQ ID NO: 7156 - DNA, 17 bp, Zea mays
ggaggagagaggagacg

SEQ ID NO: 7157 - DNA, 57 bp, Zea mays
tgtctaattcgtccaatgcctcagaaacatctactgatgctgattcactttgggtgt

SEQ ID NO: 7158 - DNA, 22 bp, Zea mays
cagtttttagaccctcttgctc

SEQ ID NO: 7159 - DNA, 13 bp, Zea mays
ttgtgtgcagtgt

SEQ ID NO: 7160 - DNA, 14 bp, Zea mays
agtggatcatcatc

SEQ ID NO: 7161 - DNA, 21 bp, Zea mays
  misc_feature (18)..(18): n is a, c, g, or t
gataagtaacagcgacangct

SEQ ID NO: 7162 - DNA, 21 bp, Zea mays
gataagtaacagcgacaggct

SEQ ID NO: 7163 - DNA, 11 bp, Zea mays
gtactgttccg

SEQ ID NO: 7164 - DNA, 11 bp, Zea mays
cggcatgcatg

SEQ ID NO: 7165 - DNA, 50 bp, Zea mays
attgcctattttcctataatttgtctagagagatctcgctccggctcttt

SEQ ID NO: 7166 - DNA, 30 bp, Zea mays
  misc_feature (4)..(4): n is a, c, g, or t
atcngtttattcttttcaccgaaagggggg

SEQ ID NO: 7167 - DNA, 30 bp, Zea mays
atctgtttattcttttcaccgaaagggggg

SEQ ID NO: 7168 - DNA, 30 bp, Zea mays
  misc_feature (5)..(5): n is a, c, g, or t
atctntttattcttttcaccgaaagggggg

SEQ ID NO: 7169 - DNA, 30 bp, Zea mays
  misc_feature (3)..(3): n is a, c, g, or t
  misc_feature (5)..(5): n is a, c, g, or t
atntntttattcttttcaccgaaagggggg

SEQ ID NO: 7170 - DNA, 16 bp, Zea mays
ttcaggattcacagta

SEQ ID NO: 7171 - DNA, 53 bp, Zea mays
tgtgattatttattagagaacatctctggctgctatccttcatatcacgtgaa

SEQ ID NO: 7172 - DNA, 13 bp, Zea mays
gatttatttgaag

SEQ ID NO: 7173 - DNA, 17 bp, Zea mays
agctatttttagcaaat

SEQ ID NO: 7174 - DNA, 33 bp, Zea mays
cctagtatcgcgagtttttatgtatccttactg

SEQ ID NO: 7175 - DNA, 48 bp, Zea mays
cagaagcttttgctgtagctacaaaaatgtcagcacaactgaaccctt

SEQ ID NO: 7176 - DNA, 10 bp, Zea mays
gcgggagccc

SEQ ID NO: 7177 - DNA, 20 bp, Zea mays
aaacggtaatgttcttatgt

SEQ ID NO: 7178 - DNA, 20 bp, Zea mays
aaacgccaatgttcttatgt

SEQ ID NO: 7179 - DNA, 10 bp, Zea mays
aaactaaaat

SEQ ID NO: 7180 - DNA, 17 bp, Zea mays
ggatcagaaaccttgca

SEQ ID NO: 7181 - DNA, 16 bp, Zea mays
cttcttggccgagctc

SEQ ID NO: 7182 - DNA, 10 bp, Zea mays
ccaagaagca

SEQ ID NO: 7183 - DNA, 28 bp, Zea mays
agtcaagtgctcgaaactcgaaaggcaa

SEQ ID NO: 7184 - DNA, 28 bp, Zea mays
agtcaagtgctcgaaactccaaagggaa

SEQ ID NO: 7185 - DNA, 12 bp, Zea mays
caatactgatga

SEQ ID NO: 7186 - DNA, 16 bp, Zea mays
gccgtgggagctgttt

SEQ ID NO: 7187 - DNA, 17 bp, Zea mays
aggaagactgaagcttg

SEQ ID NO: 7188 - DNA, 23 bp, Zea mays
aatgttattcttgggactggaat

SEQ ID NO: 7189 - DNA, 23 bp, Zea mays
aatgttatttttgggactggaat

SEQ ID NO: 7190 - DNA, 22 bp, Zea mays
catggtttttattgcctagagg

SEQ ID NO: 7191 - DNA, 15 bp, Zea mays
aaaattcgctgttgt

SEQ ID NO: 7192 - DNA, 39 bp, Zea mays
tcattctagttttctaatgtgaaattagataagtcgcat

SEQ ID NO: 7193 - DNA, 14 bp, Zea mays
gttgccttatacta

SEQ ID NO: 7194 - DNA, 32 bp, Zea mays
gttttctagtttaagatgtctggatgcccata

SEQ ID NO: 7195 - DNA, 32 bp, Zea mays
attttatattttaagatgtctggatgcccata

SEQ ID NO: 7196 - DNA, 27 bp, Zea mays
cggggaggaggtactacaggagcacga

SEQ ID NO: 7197 - DNA, 25 bp, Zea mays
tgtaagctcatacggtactcatacg

SEQ ID NO: 7198 - DNA, 25 bp, Zea mays
  misc_feature (1)..(1): n is a, c, g, or t
ngtaagctcatacggtactcatacg

SEQ ID NO: 7199 - DNA, 25 bp, Zea mays
  misc_feature (6)..(6): n is a, c, g, or t
tgtaanctcatacggtactcatacg

SEQ ID NO: 7200 - DNA, 25 bp, Zea mays
  misc_feature (16)..(16): n is a, c, g, or t
tgtaagctcatacggnactcatacg

SEQ ID NO: 7201 - DNA, 10 bp, Zea mays
ctaggaatcg

SEQ ID NO: 7202 - DNA, 17 bp, Zea mays
ttcttgaaacattacga

SEQ ID NO: 7203 - DNA, 17 bp, Zea mays
ttcttgaaacattatga

SEQ ID NO: 7204 - DNA, 15 bp, Zea mays
  misc_feature (12)..(12): n is a, c, g, or t
  misc_feature (15)..(15): n is a, c, g, or t
tagttaatttantan

SEQ ID NO: 7205 - DNA, 15 bp, Zea mays
tagttaatttagtag

SEQ ID NO: 7206 - DNA, 12 bp, Zea mays
tctaacttgcca

SEQ ID NO: 7207 - DNA, 26 bp, Zea mays
ccctaagggcttgttcggttagacgg

SEQ ID NO: 7208 - DNA, 16 bp, Zea mays
gtgtactcacaactct

SEQ ID NO: 7209 - DNA, 19 bp, Zea mays
tcagacggaccgaaacgtc

SEQ ID NO: 7210 - DNA, 63 bp, Zea mays
aatttgcattctttgacgaaatagattttttcttcaaagggaacataacagaggcctttagta

SEQ ID NO: 7211 - DNA, 29 bp, Zea mays
tatgtgcatcatggttaataagttcccct

SEQ ID NO: 7212 - DNA, 10 bp, Zea mays
gaaacagttc

SEQ ID NO: 7213 - DNA, 16 bp, Zea mays
gtttgctactactcca

SEQ ID NO: 7214 - DNA, 17 bp, Zea mays
cccatttcccccctgaa

SEQ ID NO: 7215 - DNA, 11 bp, Zea mays
caaggcagtga

SEQ ID NO: 7216 - DNA, 82 bp, Zea mays
ctccctccgtttctttttagttgtcactggatagttcaattttacactatccagcgacaactaaaacaaaacggagggagta

SEQ ID NO: 7217 - DNA, 13 bp, Zea mays
ccgatcggagctt

SEQ ID NO: 7218 - DNA, 13 bp, Zea mays
ccgatcggagctt

SEQ ID NO: 7219 - DNA, 13 bp, Zea mays
ccgtctatttatc

SEQ ID NO: 7220 - DNA, 21 bp, Zea mays
agcctttgaggcagacgttcg

SEQ ID NO: 7221 - DNA, 21 bp, Zea mays
tatgctacacttacagctgca

SEQ ID NO: 7222 - DNA, 18 bp, Zea mays
tgctgatgagccacaacc

SEQ ID NO: 7223 - DNA, 46 bp, Zea mays
tacctcttatgtcttactaggaagttatcattcaattgcatccttg

SEQ ID NO: 7224 - DNA, 11 bp, Zea mays
cgcgcgtgtcg

SEQ ID NO: 7225 - DNA, 11 bp, Zea mays
taaataataaa

SEQ ID NO: 7226 - DNA, 10 bp, Zea mays
ccgtttcatg

SEQ ID NO: 7227 - DNA, 14 bp, Zea mays
aagccatggtggca

SEQ ID NO: 7228 - DNA, 14 bp, Zea mays
aagccatggtggct

SEQ ID NO: 7229 - DNA, 14 bp, Zea mays
gcggcgtccagctc

SEQ ID NO: 7230 - DNA, 13 bp, Zea mays
tagaagatcaatc

SEQ ID NO: 7231 - DNA, 16 bp, Zea mays
aaaatattactgtaac

SEQ ID NO: 7232 - DNA, 14 bp, Zea mays
actatgaaagtatt

SEQ ID NO: 7233 - DNA, 21 bp, Zea mays
ggcatggacggacggaacgga

SEQ ID NO: 7234 - DNA, 10 bp, Zea mays
ctccttccgg

SEQ ID NO: 7235 - DNA, 12 bp, Zea mays
agctaattgtaa

SEQ ID NO: 7236 - DNA, 10 bp, Zea mays
tactctttgc

SEQ ID NO: 7237 - DNA, 13 bp, Zea mays
agctatatcgttt

SEQ ID NO: 7238 - DNA, 10 bp, Zea mays
acaggcacat

SEQ ID NO: 7239 - DNA, 15 bp, Zea mays
ctcgccatacaaccg

SEQ ID NO: 7240 - DNA, 13 bp, Zea mays
ggaagccatgcat

SEQ ID NO: 7241 - DNA, 46 bp, Zea mays
tacacgggggaacatagtgtcccaatcatttttaggagactggtaa

SEQ ID NO: 7242 - DNA, 37 bp, Zea mays
taccgggacttggtttccttctcaaagcccgaaacac

SEQ ID NO: 7243 - DNA, 11 bp, Zea mays
aagtccgatgc

SEQ ID NO: 7244 - DNA, 21 bp, Zea mays
ctaccacattgtaaaagctat

SEQ ID NO: 7245 - DNA, 13 bp, Zea mays
atggatgctagtg

SEQ ID NO: 7246 - DNA, 17 bp, Zea mays
tgtgcagtgcagcccgc

SEQ ID NO: 7247 - DNA, 22 bp, Zea mays
gctacaatgtcgctacaatgtc

SEQ ID NO: 7248 - DNA, 11 bp, Zea mays
agctataaacc

SEQ ID NO: 7249 - DNA, 48 bp, Zea mays
ttttgcatctgctttctcaggtgatgatgtatgtttacagccttacac

SEQ ID NO: 7250 - DNA, 16 bp, Zea mays
tttttttttggttaga

SEQ ID NO: 7251 - DNA, 15 bp, Zea mays
cgactcattgggttc

SEQ ID NO: 7252 - DNA, 13 bp, Zea mays
gtctggtggtttt

SEQ ID NO: 7253 - DNA, 10 bp, Zea mays
tgctgctatc

SEQ ID NO: 7254 - DNA, 13 bp, Zea mays
accaggaccagga

SEQ ID NO: 7255 - DNA, 28 bp, Zea mays
tgttttttatgaaacagcagctggaagt

SEQ ID NO: 7256 - DNA, 28 bp, Zea mays
tttttttgatgaaacagcagctggaagt

SEQ ID NO: 7257 - DNA, 11 bp, Zea mays
taacctatata

SEQ ID NO: 7258 - DNA, 13 bp, Zea mays
ttgtacgtacgta

SEQ ID NO: 7259 - DNA, 15 bp, Zea mays
ctcctgagaaagatg

SEQ ID NO: 7260 - DNA, 15 bp, Zea mays
ctcctgagaaagatg

SEQ ID NO: 7261 - DNA, 15 bp, Zea mays
  misc_feature (7)..(7): n is a, c, g, or t
ctcctgngaaagatg

SEQ ID NO: 7262 - DNA, 12 bp, Zea mays
aggtctgggtat

SEQ ID NO: 7263 - DNA, 11 bp, Zea mays
cgatcatcacc

SEQ ID NO: 7264 - DNA, 12 bp, Zea mays
aggaccaggacc

SEQ ID NO: 7265 - DNA, 10 bp, Zea mays
gtagccctac

SEQ ID NO: 7266 - DNA, 31 bp, Zea mays
cttgacacaaatcattgaatttggcacaaaa

SEQ ID NO: 7267 - DNA, 60 bp, Zea mays
catattttaagcttcaaaaattgacacaagttttgaatgtactagttcatttgttcattg

SEQ ID NO: 7268 - DNA, 10 bp, Zea mays
ggatccgatc
